(19) United States
(12) Patent Application Publication
(10) Pub. No.: US 2023/0203180 A1
(43) Pub. Date: Jun. 29, 2023

(54) MUSCLE TARGETING COMPLEXES AND USES THEREOF FOR MODULATION OF GENES ASSOCIATED WITH MUSCLE HEALTH

(71) Applicant: Dyne Therapeutics, Inc., Waltham, MA (US)

(72) Inventors: Romesh R. Subramanian, Framingham, MA (US); Mohammed T. Qatanani, Waltham, MA (US); Cody A. Desjardins, Waltham, MA (US); Duncan Brown, Berkeley, CA (US); Victor Kotelianski, Newton, MA (US); Timothy Weeden, Waltham, MA (US); Brendan Quinn, Boston, MA (US); John Najim, Waltham, MA (US)

(73) Assignee: Dyne Therapeutics, Inc., Waltham, MA (US)

(21) Appl. No.: 17/811,332

(22) Filed: Jul. 8, 2022

Related U.S. Application Data
(63) Continuation-in-part of application No. PCT/US2022/073362, filed on Jul. 1, 2022.
Application No. PCT/US2022/073362 is a continuation-in-part of application No. PCT/US2021/012637, filed on Jan. 8, 2021.
Application No. PCT/US2021/012637 is a continuation-in-part of application No. PCT/US2021/012650, filed on Jan. 8, 2021.
Application No. PCT/US2021/012650 is a continuation-in-part of application No. PCT/US2021/012699, filed on Jan. 8, 2021.
Application No. PCT/US2021/012699 is a continuation-in-part of application No. PCT/US2021/012710, filed on Jan. 8, 2021.
Application No. PCT/US2021/012710 is a continuation-in-part of application No. PCT/US2021/012789, filed on Jan. 8, 2021.
(60) Provisional application No. 63/220,039, filed on Jul. 9, 2021.
(60) Provisional application No. 63/220,050, filed on Jul. 9, 2021.
(60) Provisional application No. 63/220,056, filed on Jul. 9, 2021.
(60) Provisional application No. 63/220,071, filed on Jul. 9, 2021.
(60) Provisional application No. 63/220,085, filed on Jul. 9, 2021.
(60) Provisional application No. 62/959,334, filed on Jan. 10, 2020.
(60) Provisional application No. 62/959,398, filed on Jan. 10, 2020.
(60) Provisional application No. 62/959,590, filed on Jan. 10, 2020.
(60) Provisional application No. 62/959,469, filed on Jan. 10, 2020.
(60) Provisional application No. 62/959,461, filed on Jan. 10, 2020.
(60) Provisional application No. 62/959,484, filed on Jan. 10, 2020.
(60) Provisional application No. 62/959,596, filed on Jan. 10, 2020.
(60) Provisional application No. 62/959,361, filed on Jan. 10, 2020.
(60) Provisional application No. 62/959,601, filed on Jan. 10, 2020.
(60) Provisional application No. 62/959,619, filed on Jan. 10, 2020.
(60) Provisional application No. 62/959,627, filed on Jan. 10, 2020.
(60) Provisional application No. 62/959,813, filed on Jan. 10, 2020.

(51) Int. Cl. C07K 16/28; A61K 47/68; C12N 15/113

(52) U.S. Cl. CPC C07K 16/2881; A61K 47/6807; A61K 47/6849; C12N 15/1136; C12N 15/1137; C12N 15/1138; C12N 2310/11; C12N 2310/14; C12N 2310/315

(57) ABSTRACT

Aspects of the disclosure relate to molecular payloads that modulate the expression or activity of genes involved in muscle growth and maintenance (e.g., MSTN, INHBA, ACVR1B, MLCK1, ACVR1, FBXO32, TRIM63, MEF2D, KLF15, MED1, MED13, and/or PPP1R3A), and complexes comprising a muscle-targeting agent covalently linked to such molecular payloads. In some embodiments, the muscle-targeting agent specifically binds to an internalizing cell surface receptor on a muscle cell (e.g., a cardiac muscle cell, a smooth muscle cell, a skeletal muscle cell). In some embodiments, the molecular payload is an oligonucleotide, such as an antisense oligonucleotide or RNAi oligonucleotide.

### RELATED APPLICATIONS

[0001] This application is a Continuation-in-part of International Patent Application No. PCT/US2022/073362, filed Jul. 1, 2022, entitled “MUSCLE TARGETING COMPLEXES AND USES THEREOF FOR MODULATION OF GENES ASSOCIATED WITH MUSCLE HEALTH”, which claims priority under 35 U.S.C. § 119(e) to U.S. Provisional Application No. 63/220,050, entitled “MUSCLE TARGETING COMPLEXES AND USES THEREOF FOR MODULATION OF GENES ASSOCIATED WITH MUSCLE HEALTH”, filed on Jul. 9, 2021; U.S. Provisional Application No. 63/220,039, entitled “MUSCLE TARGETING COMPLEXES AND USES THEREOF FOR MODULATION OF MLCK1”, filed on Jul. 9, 2021; U.S. Provisional Application No. 63/220,056, entitled “MUSCLE TARGETING COMPLEXES AND USES THEREOF FOR MODULATION OF ACVR1”, filed on Jul. 9, 2021; U.S. Provisional Application No. 63/220,071, entitled “MUSCLE TARGETING COMPLEXES AND USES THEREOF FOR MODULATION OF GENES ASSOCIATED WITH MUSCLE ATROPHY”, filed on Jul. 9, 2021; and U.S. Provisional Application No. 63/220,085, entitled “MUSCLE TARGETING COMPLEXES AND USES THEREOF FOR MODULATION OF GENES ASSOCIATED WITH CARDIAC MUSCLE DISEASE”, filed on Jul. 9, 2021, the contents of each of which are incorporated herein by reference in their entirety.

[0002] This application is a Continuation-in-part of International Patent Application No. PCT/US2021/012637, filed Jan. 8, 2021, entitled “MUSCLE TARGETING COMPLEXES AND USES THEREOF FOR MODULATION OF MLCK1”, which claims priority under 35 U.S.C. § 119(e) to U.S. Provisional Application No. 62/959,334, entitled “MUSCLE TARGETING COMPLEXES AND USES THEREOF FOR MODULATION OF MLCK1”, filed Jan. 10, 2020, the contents of each of which are incorporated herein by reference in their entirety.

[0003] This application is a Continuation-in-part of International Patent Application No. PCT/US2021/012650, filed Jan. 8, 2021, entitled “MUSCLE TARGETING COMPLEXES AND USES THEREOF FOR MODULATION OF GENES ASSOCIATED WITH MUSCLE HEALTH”, which claims priority under 35 U.S.C. § 119(e) to U.S. Provisional Application No. 62/959,398, entitled “MUSCLE TARGETING COMPLEXES AND USES THEREOF FOR MODULATION OF MYOSTATIN”, filed Jan. 10, 2020; U.S. Provisional Application No. 62/959,590, entitled “MUSCLE TARGETING COMPLEXES AND USES THEREOF FOR MODULATION OF INHBA”, filed Jan. 10, 2020; and U.S. Provisional Application No. 62/959,469, entitled “MUSCLE TARGETING COMPLEXES AND USES THEREOF FOR MODULATION OF ACVR1B”, filed Jan. 10, 2020, the contents of each of which are incorporated herein by reference in their entirety.

[0004] This application is a Continuation-in-part of International Patent Application No. PCT/US2021/012699, filed Jan. 8, 2021, entitled “MUSCLE TARGETING COMPLEXES AND USES THEREOF FOR MODULATION OF ACVR1”, which claims priority under 35 U.S.C. § 119(e) to U.S. Provisional Application No. 62/959,461, entitled “MUSCLE TARGETING COMPLEXES AND USES THEREOF FOR MODULATION OF ACVR1”, filed Jan. 10, 2020, the contents of each of which are incorporated herein by reference in their entirety.

[0005] This application is a Continuation-in-part of International Patent Application No. PCT/US2021/012710, filed Jan. 8, 2021, entitled “MUSCLE TARGETING COMPLEXES AND USES THEREOF FOR MODULATION OF GENES ASSOCIATED WITH MUSCLE ATROPHY”, which claims priority under 35 U.S.C. § 119(e) to U.S. Provisional Application No. 62/959,484, entitled “MUSCLE TARGETING COMPLEXES AND USES THEREOF FOR MODULATION OF FBXO32”, filed Jan. 10, 2020; and U.S. Provisional Application No. 62/959,596, entitled “MUSCLE TARGETING COMPLEXES AND USES THEREOF FOR MODULATION OF TRIM63”, filed Jan. 10, 2020, the contents of each of which are incorporated herein by reference in their entirety.

[0006] This application is a Continuation-in-part of International Patent Application No. PCT/US2021/012789, filed Jan. 8, 2021, entitled “MUSCLE TARGETING COMPLEXES AND USES THEREOF FOR MODULATION OF GENES ASSOCIATED WITH CARDIAC MUSCLE DISEASE”, which claims priority under 35 U.S.C. § 119(e) to U.S. Provisional Application No. 62/959,361, entitled “MUSCLE TARGETING COMPLEXES AND USES THEREOF FOR MODULATION OF MEF2D”, filed Jan. 10, 2020; U.S. Provisional Application No. 62/959,601, entitled “MUSCLE TARGETING COMPLEXES AND USES THEREOF FOR MODULATION OF KLF15”, filed Jan. 10, 2020; U.S. Provisional Application No. 62/959,619, entitled “MUSCLE TARGETING COMPLEXES AND USES THEREOF FOR MODULATION OF MED1”, filed Jan. 10, 2020; U.S. Provisional Application No. 62/959,627, entitled “MUSCLE TARGETING COMPLEXES AND USES THEREOF FOR MODULATION OF MED13”, filed Jan. 10, 2020; and U.S. Provisional Application No. 62/959,813, entitled “MUSCLE TARGETING COMPLEXES AND USES THEREOF FOR MODULATION OF PPP1R3A”, filed Jan. 10, 2020, the contents of each of which are incorporated herein by reference in their entirety.

### FIELD OF THE INVENTION

[0007] The present application relates to molecular payloads (e.g., oligonucleotides) that modulate the expression or activity of genes (e.g., MSTN, INHBA, ACVR1B, MLCK1, ACVR1, FBXO32, TRIM63, MEF2D, KLF15, MED1, MED13, or PPP1R3A) associated with muscle health (e.g., muscle growth and maintenance) and targeting complexes for delivering such molecular payloads (e.g., oligonucleotides) to cells (e.g., cardiac, smooth, and/or skeletal muscle cells) and uses thereof, particularly uses relating to treatment of disease.

### REFERENCE TO AN ELECTRONIC SEQUENCE LISTING

[0008] The contents of the electronic sequence listing (D082470082US00-SEQ-ZJG.xml; Size: 2,780,768 bytes; and Date of Creation: Jul. 6, 2022) is herein incorporated by reference in its entirety.

### BACKGROUND

[0009] The expression and/or activity of several genes, including myostatin (MSTN), inhibin beta A (INHBA), activin receptor type-1B (ACVR1B), myosin light chain kinase (MLCK1), activin A receptor type-1 (ACVR1), atrogin-1 (FBXO32), tripartite motif containing 63 (TRIM63), myocyte-specific enhancer factor 2D (MEF2D), Krüppel-like factor 15 (KLF15), Mediator complex subunit 1 (MED1), Mediator complex subunit 13 (MED13), and protein phosphatase 1 regulatory subunit 3A (PPP1R3A), have been implicated in various aspects of muscle health. Aberrant expression of one or more of these genes, or expression of a mutated form thereof, may be involved in various muscle disorders, including cardiac and skeletal muscle disorders such as cardiac fibrosis, cardiac muscle atrophy, and skeletal muscle atrophy, among others.

### SUMMARY

[0010] According to some aspects, the disclosure provides molecular payloads (e.g., oligonucleotides) that modulate the expression or activity of genes (e.g., MSTN, INHBA, ACVR1B, MLCK1, ACVR1, FBXO32, TRIM63, MEF2D, KLF15, MED1, MED13, or PPP1R3A) associated with muscle health (e.g., muscle growth and maintenance) and complexes that target muscle cells (e.g., cardiac and/or skeletal muscle cells) for the purposes of delivering molecular payloads to those cells. In some embodiments, complexes provided herein are designed to target cardiac muscle cells. In some embodiments, complexes provided herein are designed to target skeletal muscle cells. In some embodiments, complexes provided herein are particularly useful for delivering molecular payloads that modulate (e.g., reduce) the expression (e.g., protein and/or RNA level) or activity of genes involved in muscle health, such as muscle growth and maintenance. Such genes include, but are not limited to: MSTN, INHBA, ACVR1B, MLCK1, ACVR1, FBXO32, TRIM63, MEF2D, KLF15, MED1, MED13, and PPP1R3A. In some embodiments, the disclosure provides complexes that target muscle cells for the purposes of delivering molecular payloads that modulate the expression of one or more MSTN, INHBA, ACVR1B, MLCK1, ACVR1, FBXO32, TRIM63, MEF2D, KLF15, MED1, MED13, and PPP1R3A.

[0011] Some aspects of the present disclosure provide complexes comprising an anti-transferrin receptor 1 antibody covalently linked to a molecular payload that modulates the expression or activity of myostatin (MSTN), inhibin beta A (INHBA), activin receptor type-1B (ACVR1B), myosin light chain kinase (MLCK1), activin A receptor type-1 (ACVR1), atrogin-1 (FBXO32), tripartite motif containing 63 (TRIM63), myocyte-specific enhancer factor 2D (MEF2D), Krüppel-like factor 15 (KLF15), Mediator complex subunit 1 (MED1), Mediator complex subunit 13 (MED13), and/or protein phosphatase 1 regulatory subunit 3A (PPP1R3A) wherein the antibody comprises:

[0012] (i) a heavy chain variable region (VH) comprising an amino acid sequence at least 95% identical to SEQ ID NO: 76; and/or a light chain variable region (VL) comprising an amino acid sequence at least 95% identical to SEQ ID NO: 75;

[0013] (ii) a heavy chain variable region (VH) comprising an amino acid sequence at least 95% identical to SEQ ID NO: 71; and/or a light chain variable region (VL) comprising an amino acid sequence at least 95% identical to SEQ ID NO: 70;

[0014] (iii) a heavy chain variable region (VH) comprising an amino acid sequence at least 95% identical to SEQ ID NO: 72; and/or a light chain variable region (VL) comprising an amino acid sequence at least 95% identical to SEQ ID NO: 70;

[0015] (iv) a heavy chain variable region (VH) comprising an amino acid sequence at least 95% identical to SEQ ID NO: 73; and/or a light chain variable region (VL) comprising an amino acid sequence at least 95% identical to SEQ ID NO: 74;

[0016] (v) a heavy chain variable region (VH) comprising an amino acid sequence at least 95% identical to SEQ ID NO: 73; and/or a light chain variable region (VL) comprising an amino acid sequence at least 95% identical to SEQ ID NO: 75;

[0017] (vi) a heavy chain variable region (VH) comprising an amino acid sequence at least 95% identical to SEQ ID NO: 76; and/or a light chain variable region (VL) comprising an amino acid sequence at least 95% identical to SEQ ID NO: 74;

[0018] (vii) a heavy chain variable region (VH) comprising an amino acid sequence at least 95% identical to SEQ ID NO: 69; and/or a light chain variable region (VL) comprising an amino acid sequence at least 95% identical to SEQ ID NO: 70;

[0019] (viii) a heavy chain variable region (VH) comprising an amino acid sequence at least 95% identical to SEQ ID NO: 77; and/or a light chain variable region (VL) comprising an amino acid sequence at least 95% identical to SEQ ID NO: 78;

[0020] (ix) a heavy chain variable region (VH) comprising an amino acid sequence at least 95% identical to SEQ ID NO: 79; and/or a light chain variable region (VL) comprising an amino acid sequence at least 95% identical to SEQ ID NO: 80; or

[0021] (x) a heavy chain variable region (VH) comprising an amino acid sequence at least 95% identical to SEQ ID NO: 77; and/or a light chain variable region (VL) comprising an amino acid sequence at least 95% identical to SEQ ID NO: 80.

[0022] In some embodiments, the antibody comprises:

[0023] (i) a VH comprising the amino acid sequence of SEQ ID NO: 76 and a VL comprising the amino acid sequence of SEQ ID NO: 75;

[0024] (ii) a VH comprising the amino acid sequence of SEQ ID NO: 71 and a VL comprising the amino acid sequence of SEQ ID NO: 70;

[0025] (iii) a VH comprising the amino acid sequence of SEQ ID NO: 72 and a VL comprising the amino acid sequence of SEQ ID NO: 70;

[0026] (iv) a VH comprising the amino acid sequence of SEQ ID NO: 73 and a VL comprising the amino acid sequence of SEQ ID NO: 74;

[0027] (v) a VH comprising the amino acid sequence of SEQ ID NO: 73 and a VL comprising the amino acid sequence of SEQ ID NO: 75;

[0028] (vi) a VH comprising the amino acid sequence of SEQ ID NO: 76 and a VL comprising the amino acid sequence of SEQ ID NO: 74;

[0029] (vii) a VH comprising the amino acid sequence of SEQ ID NO: 69 and a VL comprising the amino acid sequence of SEQ ID NO: 70;

[0030] (viii) a VH comprising the amino acid sequence of SEQ ID NO: 77 and a VL comprising the amino acid sequence of SEQ ID NO: 78;

[0031] (ix) a VH comprising the amino acid sequence of SEQ ID NO: 79 and a VL comprising the amino acid sequence of SEQ ID NO: 80; or

[0032] (x) a VH comprising the amino acid sequence of SEQ ID NO: 77 and a VL comprising the amino acid sequence of SEQ ID NO: 80.

[0033] In some embodiments, the antibody is selected from the group consisting of a full-length IgG, a Fab fragment, a Fab′ fragment, a F(ab′)2 fragment, a scFv, and a Fv. In some embodiments, the antibody is a full-length IgG. In some embodiments, the full-length IgG comprises a heavy chain constant region of the isotype IgG1, IgG2, IgG3, or IgG4.

[0034] In some embodiments, the antibody comprises:

[0035] (i) a heavy chain comprising an amino acid sequence at least 85% identical to SEQ ID NO: 91; and/or a light chain comprising an amino acid sequence at least 85% identical to SEQ ID NO: 90;

[0036] (ii) a heavy chain comprising an amino acid sequence at least 85% identical to SEQ ID NO: 86; and/or a light chain comprising an amino acid sequence at least 85% identical to SEQ ID NO: 85;

[0037] (iii) a heavy chain comprising an amino acid sequence at least 85% identical to SEQ ID NO: 87; and/or a light chain comprising an amino acid sequence at least 85% identical to SEQ ID NO: 85;

[0038] (iv) a heavy chain comprising an amino acid sequence at least 85% identical to SEQ ID NO: 88; and/or a light chain comprising an amino acid sequence at least 85% identical to SEQ ID NO: 89;

[0039] (v) a heavy chain comprising an amino acid sequence at least 85% identical to SEQ ID NO: 88; and/or a light chain comprising an amino acid sequence at least 85% identical to SEQ ID NO: 90;

[0040] (vi) a heavy chain comprising an amino acid sequence at least 85% identical to SEQ ID NO: 91; and/or a light chain comprising an amino acid sequence at least 85% identical to SEQ ID NO: 89;

[0041] (vii) a heavy chain comprising an amino acid sequence at least 85% identical to SEQ ID NO: 84; and/or a light chain comprising an amino acid sequence at least 85% identical to SEQ ID NO: 85;

[0042] (viii) a heavy chain comprising an amino acid sequence at least 85% identical to SEQ ID NO: 92; and/or a light chain comprising an amino acid sequence at least 85% identical to SEQ ID NO: 93;

[0043] (ix) a heavy chain comprising an amino acid sequence at least 85% identical to SEQ ID NO: 94; and/or a light chain comprising an amino acid sequence at least 85% identical to SEQ ID NO: 95; or

[0044] (x) a heavy chain comprising an amino acid sequence at least 85% identical to SEQ ID NO: 92; and/or a light chain comprising an amino acid sequence at least 85% identical to SEQ ID NO: 95.

[0045] In some embodiments, the antibody is a Fab fragment.

[0046] In some embodiments, the antibody comprises:

[0047] (i) a heavy chain comprising an amino acid sequence at least 85% identical to SEQ ID NO: 101; and/or a light chain comprising an amino acid sequence at least 85% identical to SEQ ID NO: 90;

[0048] (ii) a heavy chain comprising an amino acid sequence at least 85% identical to SEQ ID NO: 98; and/or a light chain comprising an amino acid sequence at least 85% identical to SEQ ID NO: 85;

[0049] (iii) a heavy chain comprising an amino acid sequence at least 85% identical to SEQ ID NO: 99; and/or a light chain comprising an amino acid sequence at least 85% identical to SEQ ID NO: 85;

[0050] (iv) a heavy chain comprising an amino acid sequence at least 85% identical to SEQ ID NO: 100; and/or a light chain comprising an amino acid sequence at least 85% identical to SEQ ID NO: 89;

[0051] (v) a heavy chain comprising an amino acid sequence at least 85% identical to SEQ ID NO: 100; and/or a light chain comprising an amino acid sequence at least 85% identical to SEQ ID NO: 90;

[0052] (vi) a heavy chain comprising an amino acid sequence at least 85% identical to SEQ ID NO: 101; and/or a light chain comprising an amino acid sequence at least 85% identical to SEQ ID NO: 89;

[0053] (vii) a heavy chain comprising an amino acid sequence at least 85% identical to SEQ ID NO: 97; and/or a light chain comprising an amino acid sequence at least 85% identical to SEQ ID NO: 85;

[0054] (viii) a heavy chain comprising an amino acid sequence at least 85% identical to SEQ ID NO: 102; and/or a light chain comprising an amino acid sequence at least 85% identical to SEQ ID NO: 93;

[0055] (ix) a heavy chain comprising an amino acid sequence at least 85% identical to SEQ ID NO: 103; and/or a light chain comprising an amino acid sequence at least 85% identical to SEQ ID NO: 95; or

[0056] (x) a heavy chain comprising an amino acid sequence at least 85% identical to SEQ ID NO: 102; and/or a light chain comprising an amino acid sequence at least 85% identical to SEQ ID NO: 95.

[0057] In some embodiments, the antibody comprises:

[0058] (i) a heavy chain comprising the amino acid sequence of SEQ ID NO: 101; and a light chain comprising the amino acid sequence of SEQ ID NO: 90;

[0059] (ii) a heavy chain comprising the amino acid sequence of SEQ ID NO: 98; and a light chain comprising the amino acid sequence of SEQ ID NO: 85;

[0060] (iii) a heavy chain comprising the amino acid sequence of SEQ ID NO: 99; and a light chain comprising the amino acid sequence of SEQ ID NO: 85;

[0061] (iv) a heavy chain comprising the amino acid sequence of SEQ ID NO: 100; and a light chain comprising the amino acid sequence of SEQ ID NO: 89;

[0062] (v) a heavy chain comprising the amino acid sequence of SEQ ID NO: 100; and a light chain comprising the amino acid sequence of SEQ ID NO: 90;

[0063] (vi) a heavy chain comprising the amino acid sequence of SEQ ID NO: 101; and a light chain comprising the amino acid sequence of SEQ ID NO: 89;

[0064] (vii) a heavy chain comprising the amino acid sequence of SEQ ID NO: 97; and a light chain comprising the amino acid sequence of SEQ ID NO: 85;

[0065] (viii) a heavy chain comprising the amino acid sequence of SEQ ID NO: 102; and a light chain comprising the amino acid sequence of SEQ ID NO: 93;

[0066] (ix) a heavy chain comprising the amino acid sequence of SEQ ID NO: 103; and a light chain comprising the amino acid sequence of SEQ ID NO: 95; or

[0067] (x) a heavy chain comprising the amino acid sequence of SEQ ID NO: 102; and a light chain comprising the amino acid sequence of SEQ ID NO: 95.

[0068] In some embodiments, the equilibrium dissociation constant (K_{D}) of binding of the antibody to the transferrin receptor is in a range from 10⁻¹¹ M to 10⁻⁶ M.

[0069] In some embodiments, the antibody does not specifically bind to the transferrin binding site of the transferrin receptor and/or wherein the antibody does not inhibit binding of transferrin to the transferrin receptor.

[0070] In some embodiments, the antibody is cross-reactive with extracellular epitopes of two or more of a human, non-human primate and rodent transferrin receptor.

[0071] In some embodiments, the anti-TfR1 antibody has undergone pyroglutamate formation resulting from a post-translational modification.

[0072] In some embodiments, the complex is configured to promote transferrin receptor mediated internalization of the molecular payload into a muscle cell.

[0073] In some embodiments, the molecular payload is an oligonucleotide.

[0074] In some embodiments, the molecular payload is an oligonucleotide comprising an antisense strand comprising a region of complementarity to an MSTN target sequence. In some embodiments, the MSTN target sequence is an MSTN mRNA sequence as set forth in SEQ ID NOs: 146-148, or an MSTN target sequence as set forth in any one of SEQ ID NOs: 149-196. In some embodiments, the antisense strand is 18-25 nucleotides in length and/or the region of complementarity is at least 16 nucleosides in length. In some embodiments, the antisense strand comprises at least 16 consecutive nucleotides of a nucleotide sequence set forth in any one of SEQ ID NOs: 197-220, wherein each of the Us are optionally and independently Ts. In some embodiments, the antisense strand comprises the nucleotide sequence of any one of SEQ ID NOs: 197-220, wherein each of the Us are optionally and independently Ts.

[0075] In some embodiments, wherein the molecular payload is an oligonucleotide comprising an antisense strand comprising a region of complementarity to an INHBA target sequence. In some embodiments, the INHBA target sequence is an INHBA mRNA sequence as set forth in SEQ ID NO: 269 or SEQ ID NO: 270, or an INHBA target sequence as set forth in any one of SEQ ID NOs: 271-318. In some embodiments, the antisense strand is 18-25 nucleotides in length and/or the region of complementarity is at least 16 nucleosides in length. In some embodiments, the antisense strand comprises at least 16 consecutive nucleotides of a nucleotide sequence set forth in any one of SEQ ID NOs: 319-342, wherein each of the Us are optionally and independently Ts. In some embodiments, the antisense strand comprises the nucleotide sequence of any one of SEQ ID NOs: 319-342, wherein each of the Us are optionally and independently Ts.

[0076] In some embodiments, the molecular payload is an oligonucleotide comprising an antisense strand comprising a region of complementarity to an ACVR1B target sequence. In some embodiments, the ACVR1B target sequence is an ACVR1B mRNA sequence as set forth in any one of SEQ ID NOs: 367-370, or an ACVR1B target sequence as set forth in any one of SEQ ID NOs: 221-268. In some embodiments, the antisense strand is 18-25 nucleotides in length and/or the region of complementarity is at least 16 nucleosides in length. In some embodiments, the antisense strand comprises at least 16 consecutive nucleotides of a nucleotide sequence set forth in any one of SEQ ID NOs: 343-366, wherein each of the Us are optionally and independently Ts. In some embodiments, the antisense strand comprises the nucleotide sequence of any one of SEQ ID NOs: 343-366, wherein each of the Us are optionally and independently Ts.

[0077] In some embodiments, the molecular payload is an oligonucleotide comprising an antisense strand comprising a region of complementarity to a MLCK1 target sequence. In some embodiments, the MLCK1 target sequence is a MLCK1 mRNA as set forth in SEQ ID NO: 411. In some embodiments, the antisense strand is 18-25 nucleotides in length and/or the region of complementarity is at least 16 nucleosides in length.

[0078] In some embodiments, the molecular payload is an oligonucleotide comprising an antisense strand comprising a region of complementarity to a ACVR1 target sequence. In some embodiments, the ACVR1 target sequence is an ACVR1 mRNA sequence as set forth in SEQ ID NO: 429 or SEQ ID NO: 430, or an ACVR1 target sequence as set forth in any one of SEQ ID NOs: 431-478. In some embodiments, the antisense strand is 18-25 nucleotides in length and/or the region of complementarity is at least 16 nucleosides in length. In some embodiments, the antisense strand comprises at least 16 consecutive nucleotides of a nucleotide sequence set forth in any one of SEQ ID NOs: 479-502, wherein each of the Us are optionally and independently Ts. In some embodiments, the antisense strand comprises the nucleotide sequence of any one of SEQ ID NOs: 479-502, wherein each of the Us are optionally and independently Ts.

[0079] In some embodiments, the molecular payload is an oligonucleotide comprising an antisense strand comprising a region of complementarity to a FBXO32 target sequence. In some embodiments, the FBXO32 target sequence is an FBXO32 mRNA sequence as set forth in SEQ ID NO: 505 or SEQ ID NO: 506, or a FBXO32 target sequence as set forth in any one of SEQ ID NOs: 507-554. In some embodiments, the antisense strand is 18-25 nucleotides in length and/or the region of complementarity is at least 16 nucleosides in length. In some embodiments, the antisense strand comprises at least 16 consecutive nucleotides of a nucleotide sequence set forth in any one of SEQ ID NOs: 555-578, wherein each of the Us are optionally and independently Ts. In some embodiments, the antisense strand comprises the nucleotide sequence of any one of SEQ ID NOs: 555-578, wherein each of the Us are optionally and independently Ts.

[0080] In some embodiments, the molecular payload is an oligonucleotide comprising an antisense strand comprising a region of complementarity to TRIM63 target sequence. In some embodiments, the TRIM63 target sequence is a TRIM63 mRNA sequence as set forth in SEQ ID NO: 579 or SEQ ID NO: 580, or a TRIM63 target sequence as set forth in any one of SEQ ID NOs: 581-628. In some embodiments, the antisense strand is 18-25 nucleotides in length and/or the region of complementarity is at least 16 nucleosides in length. In some embodiments, the antisense strand comprises at least 16 consecutive nucleotides of a nucleotide sequence set forth in any one of SEQ ID NOs: 629-652, wherein each of the Us are optionally and independently Ts. In some embodiments, the antisense strand comprises the nucleotide sequence of any one of SEQ ID NOs: 629-652, wherein each of the Us are optionally and independently Ts.

[0081] In some embodiments, the molecular payload is an oligonucleotide comprising an antisense strand comprising a region of complementarity to a MEF2D target sequence. In some embodiments, the MEF2D target sequence is an MEF2D mRNA sequence as set forth in SEQ ID NO: 664 or SEQ ID NO: 665, or a MEF2D target sequence as set forth in any one of SEQ ID NOs: 668-715. In some embodiments, the antisense strand is 18-25 nucleotides in length and/or the region of complementarity is at least 16 nucleosides in length. In some embodiments, the antisense strand comprises at least 16 consecutive nucleotides of a nucleotide sequence set forth in any one of SEQ ID NOs: 716-223, wherein each of the Us are optionally and independently Ts. In some embodiments, the antisense strand comprises the nucleotide sequence of any one of SEQ ID NOs: 716-223, wherein each of the Us are optionally and independently Ts.

[0082] In some embodiments, the molecular payload is an oligonucleotide comprising an antisense strand comprising a region of complementarity to KLF15 target sequence. In some embodiments, the KLF15 target sequence is a KLF15 mRNA sequence as set forth in SEQ ID NO: 740 or SEQ ID NO: 741, or a KLF15 target sequence as set forth in any one of SEQ ID NOs: 742-789. In some embodiments, the antisense strand is 18-25 nucleotides in length and/or the region of complementarity is at least 16 nucleosides in length. In some embodiments, the antisense strand comprises at least 16 consecutive nucleotides of a nucleotide sequence set forth in any one of SEQ ID NOs: 790-813, wherein each of the Us are optionally and independently Ts. In some embodiments, the antisense strand comprises the nucleotide sequence of any one of SEQ ID NOs: 790-813, wherein each of the Us are optionally and independently Ts.

[0083] In some embodiments, the molecular payload is an oligonucleotide comprising an antisense strand comprising a region of complementarity to a MED1 target sequence. In some embodiments, the MED1 target sequence is a MED1 mRNA sequence as set forth in SEQ ID NO: 814 or SEQ ID NO: 815, or a MED1 target sequence as set forth in any one of SEQ ID NOs: 816-863. In some embodiments, the antisense strand is 18-25 nucleotides in length and/or the region of complementarity is at least 16 nucleosides in length. In some embodiments, the antisense strand comprises at least 16 consecutive nucleotides of a nucleotide sequence set forth in any one of SEQ ID NOs: 864-887, wherein each of the Us are optionally and independently Ts. In some embodiments, the antisense strand comprises the nucleotide sequence of any one of SEQ ID NOs: 864-887, wherein each of the Us are optionally and independently Ts.

[0084] In some embodiments, the molecular payload is an oligonucleotide comprising an antisense strand comprising a region of complementarity to a MED13 target sequence. In some embodiments, the MED13 target sequence is a MED13 mRNA sequence as set forth in SEQ ID NO: 888 or SEQ ID NO: 889, or a MED13 target sequence as set forth in any one of SEQ ID NOs: 890-937. In some embodiments, the antisense strand is 18-25 nucleotides in length and/or the region of complementarity is at least 16 nucleosides in length. In some embodiments, the antisense strand comprises at least 16 consecutive nucleotides of a nucleotide sequence set forth in any one of SEQ ID NOs: 938-961, wherein each of the Us are optionally and independently Ts. In some embodiments, the antisense strand comprises the nucleotide sequence of any one of SEQ ID NOs: 938-961, wherein each of the Us are optionally and independently Ts.

[0085] In some embodiments, the molecular payload is an oligonucleotide comprising an antisense strand comprising a region of complementarity to PPP1R3A target sequence. In some embodiments, the PPP1R3A target sequence is a PPP1R3A mRNA sequence as set forth in SEQ ID NO: 962 or SEQ ID NO: 963, or a PPP1R3A target sequence as set forth in any one of SEQ ID NOs: 964-1011. In some embodiments, the antisense strand is 18-25 nucleotides in length and/or the region of complementarity is at least 16 nucleosides in length. In some embodiments, the antisense strand comprises at least 16 consecutive nucleotides of a nucleotide sequence set forth in any one of SEQ ID NOs: 1012-1035, wherein each of the Us are optionally and independently Ts. In some embodiments, the antisense strand comprises the nucleotide sequence of any one of SEQ ID NOs: 1012-1035, wherein each of the Us are optionally and independently Ts.

[0086] In some embodiments, the oligonucleotide further comprises a sense strand that hybridizes to the antisense strand to form a double stranded siRNA.

[0087] In some embodiments, the oligonucleotide comprises one or more modified nucleosides. In some embodiments, each nucleoside in the oligonucleotide is a modified nucleoside. In some embodiments, the one or more modified nucleosides are 2′ modified nucleotides. In some embodiments, the one or more 2′ modified nucleosides are selected from: 2′-fluoro (2′-F), 2′-O-methyl (2′-O-Me), 2′-O-methoxyethyl (2′-MOE), 2′-O-aminopropyl (2′-O-AP), 2′-O-dimethylaminoethyl (2′-O-DMAOE), 2′-O-dimethylaminopropyl (2′-O-DMAP), 2′-O-dimethylaminoethyloxyethyl (2′-O-DMAEOE), 2′-O—N-methylacetamido (2′-O-NMA), locked nucleic acid (LNA), ethylene-bridged nucleic acid (ENA), and (S)-constrained ethyl-bridged nucleic acid (cEt). In some embodiments, the 2′ modified nucleotide is 2′-O-methyl or 2′-fluoro (2′-F). In some embodiments, the oligonucleotide comprises one or more phosphorothioate internucleoside linkages. In some embodiments, the one or more phosphorothioate internucleoside linkage are present on the antisense strand of the RNAi oligonucleotide. In some embodiments, the two internucleoside linkages at the 3′ end of the sense strands are phosphorothioate internucleoside linkages.

[0088] In some embodiments, the oligonucleotide is an siRNA listed in Table 10, Table 13, Table 16, Table 19, Table 22, Table 25, Table 28, Table 31, Table 34, Table 37, or Table 40.

[0089] In some embodiments, the antibody is covalently linked to the molecular payload via: (i) a cleavable linker; or (ii) a non-cleavable linker. In some embodiments, the cleavable linker comprises a valine-citrulline sequence. In some embodiments, the non-cleavable linker is an alkane linker.

[0090] Other aspects of the present disclosure provide methods of reducing MSTN, INHBA, ACVR1B, MLCK1, ACVR1, FBXO32, TRIM63, MEF2D, KLF15, MED1, MED13, and/or PPP1R3A expression in a muscle cell, the method comprising contacting the muscle cell with an effective amount of the complex described herein for promoting internalization of the molecular payload to the muscle cell.

[0091] Other aspects of the present disclosure provide methods of treating muscle atrophy the method comprising administering to a subject in need thereof an effective amount of the complex described herein, wherein the subject has elevated expression or activity of MSTN, INHBA, and/or ACVR1B, and the complex comprises a molecular payload that modulates the expression or activity of MSTN, INHBA, and/or ACVR1B. In some embodiments, the subject is a human. In some embodiments, the administration in intravenous.

[0092] Other aspects of the present disclosure provide methods of treating irritable bowel syndrome (IBS) or irritable bowel disease (IBD) the method comprising administering to a subject in need thereof an effective amount of the complex described herein, wherein the subject has elevated levels of MLCK1 protein and the complex comprises a molecular payload that modulates the expression or activity of MLCK1. In some embodiments, the subject is a human. In some embodiments, the administration in intravenous.

[0093] Other aspects of the present disclosure provide methods of treating a disease associated with an elevated level of ACVR1, the method comprising administering to a subject in need thereof an effective amount of the complex described herein, wherein the subject has elevated levels of ACVR1 protein and the complex comprises a molecular payload that modulates the expression or activity of ACVR1. In some embodiments, the disease associated with an elevated level of ACVR1 is muscle atrophy. In some embodiments, the muscle atrophy is sarcopenia or cachexia. In some embodiments, the subject is a human. In some embodiments, the administration in intravenous.

[0094] Other aspects of the present disclosure provide methods of treating muscle atrophy the method comprising administering to a subject in need thereof an effective amount of the complex described herein, wherein the subject has elevated expression or activity of FBXO32 or TRIM63, and the complex comprises a molecular payload that modulates the expression or activity of FBXO32 or TRIM63. In some embodiments, the subject is a human. In some embodiments, the administration in intravenous.

[0095] Other aspects of the present disclosure provide methods of treating a heart disease, the method comprising administering to a subject in need thereof an effective amount of the complex described herein, wherein the subject has elevated expression or activity of MEF2D, KLF15, MED1, MED13, and/or PPP1R3A, and the complex comprises a molecular payload that modulates the expression or activity of MEF2D, KLF15, MED1, MED13, and/or PPP1R3A. In some embodiments, the subject is a human. In some embodiments, the administration in intravenous.

[0096] In some embodiments, the complex reduces RNA level of MSTN, INHBA, ACVR1B, MLCK1, ACVR1, FBXO32, TRIM63, MEF2D, KLF15, MED1, MED13, and/or PPP1R3A. In some embodiments, the complex reduces protein level of MSTN, INHBA, ACVR1B, MLCK1, ACVR1, FBXO32, TRIM63, MEF2D, KLF15, MED1, MED13, and/or PPP1R3A.

### BRIEF DESCRIPTION OF THE DRAWINGS

[0097] FIG. 1 depicts a non-limiting schematic showing the effect of transfecting cells with an siRNA.

[0098] FIG. 2 depicts a non-limiting schematic showing the activity of a muscle targeting complex comprising an siRNA.

[0099] FIGS. 3A-3B depict non-limiting schematics showing the activity of a muscle targeting complex comprising an siRNA in mouse muscle tissue (gastrocnemius (FIG. 3A) and heart (FIG. 3B)) in vivo, relative to vehicle-treated control experiments. (N=4 C57BL/6 WT mice).

[0100] FIGS. 4A-4E depict non-limiting schematics showing the tissue selectivity of a muscle targeting complex (anti-TfR1 antibody-siHPRT) comprising an anti-TfR Fab (RI7 217) conjugated to HPRT-specific siRNA to reduce expression levels of HPRT genes. The data show gene expression in brain (FIG. 4A), liver (FIG. 4B), lung (FIG. 4C), kidney (FIG. 4D), and spleen (FIG. 4E), and demonstrate that muscle targeting complexes do not facilitate gene inhibition in non-muscle tissues.

[0101] FIG. 5 shows inhibition of MSTN gene expression by 24 siRNAs tested at 0.5 nM and 10 nM doses.

[0102] FIG. 6 shows dose response curves for inhibition of human MSTN by oligonucleotide candidate sequences over a range of concentrations from 100 nM to 10 fM.

[0103] FIG. 7 shows inhibition of INHBA gene expression by 24 siRNAs tested at 0.5 nM and 10 nM doses

[0104] FIG. 8 shows dose response curves for inhibition of human INHBA by oligonucleotide candidate sequences over a range of concentrations from 100 nM to 10 fM.

[0105] FIG. 9 shows inhibition of ACVR1B gene expression by 24 siRNAs tested at 0.1 nM and 10 nM doses.

[0106] FIG. 10 shows dose response curves for inhibition of human ACVR1B by oligonucleotide candidate sequences over a range of concentrations from 100 nM to 10 fM.

[0107] FIG. 11 shows dose response curves for inhibition of murine ACVR1B by oligonucleotide candidate sequences over a range of concentrations from 100 nM to 10 fM.

[0108] FIG. 12 shows percent knockdown of human ACVR1 expression by oligonucleotide candidate sequences in cell culture at concentrations of 10 nM and 0.5 nM.

[0109] FIG. 13 shows dose response curves for inhibition of human ACVR1 by different oligonucleotides over a range of concentrations from 100 nM to 10 fM.

[0110] FIG. 14 depicts the results of a dual-luciferase gene inhibition assay used to identify candidate oligonucleotides capable of inhibiting expression of FBXO32. Candidate oligonucleotides (siRNA molecules) were evaluated at a concentration of 0.1 nM and a concentration of 10 nM in a cross species, human/cyno, or rat/mouse system.

[0111] FIG. 15 depicts the results of a dual-luciferase gene inhibition assay used to identify candidate oligonucleotides capable of inhibiting expression of TRIM63. Candidate oligonucleotides (siRNA molecules) were evaluated at a concentration of 0.1 nM and a concentration of 10 nM in a cross species, human/cyno, or rat/mouse system.

[0112] FIGS. 16A-16B depict a dose response curve for inhibition of human (FIG. 16A) and murine (FIG. 16B) FBXO32 by candidate oligonucleotide sequences over a range of concentrations from 100 nM to 10 fM.

[0113] FIGS. 17A-17B depict a dose response curve for inhibition of human (FIG. 17A) and murine (FIG. 17B) TRIM63 by candidate oligonucleotide sequences over a range of concentrations from 100 nM to 10 fM.

[0114] FIG. 18 shows percent knockdown of human and murine MEF2D expression by oligonucleotide candidate sequences in cell culture at concentrations of 10 nM and 0.1 nM.

[0115] FIG. 19 shows percent knockdown of human and murine KLF15 expression by oligonucleotide candidate sequences in cell culture at concentrations of 10 nM and 0.1 nM.

[0116] FIG. 20 shows percent knockdown of human MED1 expression by oligonucleotide candidate sequences in cell culture at concentrations of 10 nM and 0.5 nM.

[0117] FIG. 21 shows percent knockdown of human MED13 expression by oligonucleotide candidate sequences in cell culture at concentrations of 10 nM and 0.1 nM.

[0118] FIG. 22 shows percent knockdown of human and murine PPP1R3A expression by oligonucleotide candidate sequences in cell culture at concentrations of 10 nM and 0.5 nM.

[0119] FIGS. 23A-23B show dose response curves for inhibition of human MEF2D (FIG. 23A) and murine MEF2D (FIG. 23B) by oligonucleotide candidate sequences over a range of concentrations from 100 nM to 10 fM.

[0120] FIGS. 24A-24B show dose response curves for inhibition of human KLF15 (FIG. 24A) and murine KLF15 (FIG. 24B) by oligonucleotide candidate sequences over a range of concentrations from 100 nM to 10 fM.

[0121] FIG. 25 shows dose response curves for inhibition of human MED1 by oligonucleotide candidate sequences over a range of concentrations from 100 nM to 10 fM.

[0122] FIG. 26 shows dose response curves for inhibition of human MED13 by oligonucleotide candidate sequences over a range of concentrations from 100 nM to 10 fM.

[0123] FIGS. 27A-27B show dose response curves for inhibition of human PPP1R3A (FIG. 27A) and murine PPP1R3A (FIG. 27B) by oligonucleotide candidate sequences over a range of concentrations from 100 nM to 10 fM.

[0124] FIGS. 28A-28H show that conjugates having an anti-TfR1 Fab conjugated to a DMPK-targeting oligonucleotide (ASO300) reduced mouse DMPK expression in various muscle tissues in a mouse model that expresses human TfR1. The DMPK-targeting oligonucleotide was conjugated to anti-TfR1 Fab 3M12-VH4/VK3. FIG. 28A shows that the conjugate reduced mouse wild-type Dmpk in Tibialis Anterior by 79%. FIG. 28B shows that the conjugate reduced mouse wild-type Dmpk in gastrocnemius by 76%. FIG. 28C shows that the conjugate reduced mouse wild-type Dmpk in the heart by 70%. FIG. 28D shows that the conjugate reduced mouse wild-type Dmpk and in diaphragm by 88%. FIGS. 28E-28H show oligonucleotide distributions in Tibialis Anterior (FIG. 28E), gastrocnemius (FIG. 28F), heart (FIG. 28G), and diaphragm (FIG. 28H).

### DETAILED DESCRIPTION

[0125] Some aspects of the present disclosure provide molecular payloads (e.g., oligonucleotides) that modulate the expression or activity of genes (e.g., MSTN, INHBA, or ACDR1B) associated with muscle health (e.g., muscle growth and maintenance). Other aspects of the disclosure relate to a recognition that while certain molecular payloads (e.g., oligonucleotides, peptides, small molecules) can have beneficial effects in muscle cells (e.g., cardiac muscle cells), it has proven challenging to effectively target such cells. Accordingly, further provided herein are complexes comprising muscle-targeting agents covalently linked to molecular payloads in order to overcome such challenges. In some embodiments, the complexes are particularly useful for delivering molecular payloads that inhibit the expression or activity of target genes in muscle cells, e.g., in a subject having or suspected of having a rare muscle disease. In some embodiments, complexes provided herein are designed to target cardiac muscle cells or cardiac muscle tissues. In some embodiments, complexes provided herein are provided for treating subjects having muscle atrophy (e.g., sarcopenia or cachexia). For example, in some embodiments, complexes are provided for targeting MSTN expression to treat subjects having cardiac muscle wasting, cardiomyopathy, or cardiac cachexia, and/or skeletal muscle atrophy. In some embodiments, complexes are provided for targeting INHBA to treat subjects having muscle atrophy (e.g., cardiac muscle atrophy). In some embodiments, complexes are provided for targeting ACVR1B to treat subjects having cardiac fibrosis or cardiac hypertrophy.

[0126] Myostatin, also referred to as growth differentiation factor 8 (GDF8), is a secreted growth factor that negatively regulates muscle mass. In humans, myostatin is encoded by the MSTN gene. Loss-of-function mutations in the Myostatin gene (MSTN), leading to a hypermuscular phenotype, have been described in cattle, sheep, fish, dogs and humans. Myostatin is expressed in skeletal muscle, with lower levels of expression reported in adipose and cardiac tissues. Inhibition of Myostatin signaling leads to an increase in muscle size.

[0127] Myostatin may inhibit cardiomyocyte proliferation and differentiation by manipulating cell cycle progression, and has been shown to prevent cell cycle G1 to S phase transition by decreasing levels of cyclin-dependent kinase complex 2 (CDK2) and by increasing p21 levels. Physiologically, minimal amounts of cardiac myostatin are secreted from the myocardium into serum, having a limited effect on muscle growth. However, increases in cardiac myostatin can increase its serum concentration, which may cause skeletal muscle atrophy.

[0128] Pathological states that increase cardiac stress and promote heart failure can induce a rise in both cardiac myostatin mRNA and protein levels within the heart. In ischemic or dilated cardiomyopathy, increased levels of myostatin mRNA have been detected within the left ventricle. Furthermore, increases in myostatin levels during chronic heart failure have been shown to cause cardiac cachexia. It has been shown that systemic inhibition of cardiac myostatin maintains overall muscle weight in experimental models with pre-existing heart failure.

[0129] Inhibin beta A (INHBA) is a protein that can exist as an oligomer subunit of activin A and inhibin A. In some instances, INHBA can form a disulfide-linked homodimer (i.e., dimer between two INHBA molecules) to form activin A, which enhances follicle-stimulating hormone (FSH) biosynthesis and secretion, and is involved in several biological processes including cell proliferation and differentiation, immune response and wound repair, and endocrine function. In other instances, INHBA can dimerize with inhibin alpha to form inhibin A, which decreases FSH biosynthesis and secretion.

[0130] Activin A interacts with Activin type 1 receptors (e.g., ACVR1, ACVR1B, and ACVR1C) and Activin type 2 receptors (ACVR2A and ACVR2B). These protein-protein interactions lead to phosphorylation of SMAD2 and SMAD3, which can ultimately result in the changes in gene expression for a large variety of genes.

[0131] Activin A has been shown to negatively regulate muscle mass (e.g., in connection with myostatin) and thus has been implicated in several muscle disorders, including muscle atrophy (e.g., cardiac muscle atrophy), e.g., as described in Lee S J, et al., “Regulation of muscle mass by follistatin and activins”, Mol. Endocrinol. 2010 October; 24(10):1998-2008; and Lach-Trifilieff et al., Mol Cell Biol. 2014 February; 34(4): 606-618. In some instances, muscle atrophy results in life threatening complications. Elevated Activin A level has also been associated with myocardial complications in type 2 diabetes patients (e.g., as described in Lin et al., Acta Cardiol Sin. 2016 July; 32(4): 420-427; and Kuo et al., Sci Rep 8, 9957 (2018)). These indications demonstrate that compositions and methods for targeting activin A and its subunit INHBA could provide therapeutic benefit. However, effective treatments that target the function and expression of INHBA (e.g., including dimerization to form activin A) are limited.

[0132] Activin receptor type-1B (ACVR1B), also known as ALK-4, is a transmembrane serine/threonine kinase activin type-1 receptor that interacts with activin receptor type-2 to form an activin receptor complex. The activin receptor complex functions to bind to activin and regulate a diverse array of cellular processes through signal transduction, including neuronal differentiation and survival, wound healing, extracellular matrix production, immunosuppression and carcinogenesis. Within the receptor complex, ACVR1B becomes phosphorylated by activin receptor type-2 proteins following activin binding. Phosphorylated ACVR1B can subsequently phosphorylate several of the SMAD proteins (e.g., SMAD2 and SMAD3) to propagate activin signaling. An interaction between ACVR1B and SMAD7 can alternatively function to inhibit activin signaling.

[0133] It has been established that activin, functioning through its signal transduction pathway through ACVR1B, is a key regulator of cardiac fibrosis (e.g., atrial fibrosis). This regulation is thought to be enhanced by presence of Angiotensin-II. Cardiac fibrosis, a condition involving excess production of extracellular matrix in the cardiac muscle, is commonly associated with structural remodeling associated with abnormal cardiac function, atrial fibrillation, and/or heart attacks. See, e.g., Wang, Q. et al. “The crucial role of activin A/ALK4 pathway in the pathogenesis of Ang-II-induced atrial fibrosis and vulnerability to atrial fibrillation.” Basic Res Cardiol. 2017 July; 112(4):47, the content of which is incorporated herein by reference. It has further been shown that targeting ACVR1B functions to counteract cardiac fibrosis and dysfunction in subjects having cardiac fibrosis. Additionally, inhibition of ACVR1B has an effect in subjects having cardiac hypertrophy. See, e.g., Chen Y. H. et al., “Haplodeficiency of activin receptor-like kinase 4 alleviates myocardial infarction-induced cardiac fibrosis and preserves cardiac function.” J Mol Cell Cardiol. 2017 April; 105:1-11.; and Wang, Q. et al., “Activin Receptor-Like Kinase 4 Haplodeficiency Mitigates Arrhythmogenic Atrial Remodeling and Vulnerability to Atrial Fibrillation in Cardiac Pathological Hypertrophy.” J Am Heart Assoc. 2018 Aug. 21; 7(16):e008842; the contents of each of which are incorporated herein by reference.

[0134] Some aspects of the present disclosure provide molecular payloads that modulate the expression or activity of MLCK1 (e.g., oligonucleotides targeting MLCK1 RNAs). Other aspects of the disclosure relate to a recognition that while certain molecular payloads (e.g., oligonucleotides, peptides, small molecules) can have beneficial effects in muscle cells, it has proven challenging to effectively target such cells. Accordingly, further provided herein are complexes comprising muscle-targeting agents covalently linked to molecular payloads in order to overcome such challenges. In some embodiments, the complexes are particularly useful for delivering molecular payloads that inhibit the expression or activity of target genes in muscle cells, e.g., in a subject having or suspected of having a rare muscle disease. In some embodiments, complexes provided herein are designed to target smooth muscle cells or smooth muscle tissues. For example, in some embodiments, complexes are provided for targeting a MLCK1 to treat subjects having irritable bowel syndrome (IBS) or inflammatory bowel disease (IBD).

[0135] Myosin light chain kinase (“MLCK1” or “MYLK”), also known as kinase-related protein or telokin, is an enzyme that phosphorylates myosin regulatory light chains in order to facilitate myosin interaction with actin filaments in smooth muscle. MLCK1 is one of four isoforms of myosin light chain kinase and is expressed in smooth muscle. The other isoforms—MLCK2, MLCK3, and MLCK4—are expressed in skeletal, cardiac, and cancerous cells, respectively.

[0136] It has recently been shown that MLCK1 is a potential therapeutic target for irritable bowel syndrome (See, Graham, W. V. et al. “Intracellular MLCK1 diversion reverses barrier loss to restore mucosal homeostasis.” Nature Medicine, volume 25, 690-700, 2019). MLCK1 is a critical protein in regulating epithelial barrier dysfunction, which is associated with intestinal diseases (e.g., irritable bowel syndrome). Restoration of the epithelial barrier in smooth muscles tissues (e.g., through inhibition of MLCK1) can limit or reverse these intestinal diseases. Thus, development of novel MLCK1 inhibitors is desired.

[0137] Some aspects of the present disclosure provide molecular payloads that modulate the expression or activity of ACVR1 (e.g., oligonucleotides targeting ACVR1 RNAs). Other aspects of the disclosure relate to a recognition that while certain molecular payloads (e.g., oligonucleotides, peptides, small molecules) can have beneficial effects in muscle cells, it has proven challenging to effectively target such cells. Accordingly, provided herein are complexes comprising muscle-targeting agents covalently linked to molecular payloads in order to overcome such challenges. In some embodiments, the complexes are particularly useful for delivering molecular payloads that inhibit the expression or activity of target genes in muscle cells, e.g., in a subject having or suspected of having a rare muscle disease. In some embodiments, complexes provided herein are designed to target cardiac muscle cells or cardiac muscle tissues. For example, in some embodiments, complexes are provided for targeting an ACVR1 to treat subjects having cardiac disease (e.g., cardiac hypertrophy) or muscle atrophy (e.g., sarcopenia or cachexia).

[0138] Activin A receptor, type 1 (ACVR1), a BMP type I receptor (also known as Activin receptor-like kinase-2 (ALK-2), ACTRIA, ACVRLK2), is a signaling receptor that binds to Activin A. These protein-protein interactions lead to phosphorylation of SMAD2 and SMAD3, which can ultimately result in the changes in gene expression for a large variety of genes.

[0139] ACVR1 has been associated with angiotensin II-induced cardiac hypertrophy and muscle atrophy (e.g., sarcopenia or cachexia). Specifically, deletion of ACVR1 in cardiomyocytes has been shown to reduce cardiac hypertrophy in diseased mice (Shahid, M. et al. “BMP type I receptor ALK2 is required for angiotensin II-induced cardiac hypertrophy” Am J Physiol Heart Circ Physiol. 2016 Apr. 15; 310(8):H984-94). Fibrodysplasia ossificans progressiva (FOP) is caused by heterozygous mutations in ACVR1 (e.g., ACVR1 R206H mutation). These indications demonstrate that compositions and methods for targeting ACVR1 could provide therapeutic benefit. However, effective treatments that target the function and expression of ACVR1 are limited.

[0140] Some aspects of the present disclosure provide molecular payloads (e.g., oligonucleotides) that modulate the expression or activity of genes associated with muscle atrophy (e.g., FBXO32 or TRIM63). Other aspects of the disclosure relate to a recognition that while certain molecular payloads (e.g., oligonucleotides, peptides, small molecules) can have beneficial effects in muscle cells, it has proven challenging to effectively target such cells. Accordingly, further provided herein are complexes comprising muscle-targeting agents covalently linked to molecular payloads in order to overcome such challenges. In some embodiments, the complexes are particularly useful for delivering molecular payloads that inhibit the expression or activity of target genes in muscle cells, e.g., in a subject having or suspected of having a rare muscle disease. In some embodiments, complexes provided herein are designed to target cardiac muscle cells or cardiac muscle tissues. For example, in some embodiments, complexes are provided for targeting a FBXO32 to treat subjects having muscle atrophy. In some embodiments, complexes are provided for targeting a TRIM63 to treat subjects having muscle atrophy.

[0141] FBXO32, which is also referred to as atrogin-1 and Muscle atrophy F-box gene (MAFbx), is an E3 ubiquitin ligase and a member of the F-box protein family. F-box proteins have been shown to regulate ubiquitin-mediated protein degradation. Although FBXO32 lacks leucine-rich regions and WD40 repeats that are commonly found in F-box proteins, FBXO32 comprises a PDZ domain that is capable of binding other proteins. Serving as an adaptor, FBXO32 bridges proteins to be ubiquitinated with other components of the Skp, Cullin, F-box containing complex (or SCF complex). In humans, FBXO32 protein is encoded by the FBXO32 gene.

[0142] FBXO32 is predominantly expressed in striated muscle and has been implicated in regulating protein synthesis and degradation during muscle atrophy. For example, FBXO32 expression is significantly increased during muscle atrophy. See, e.g., Gomes et al., Proc Natl Acad Sci USA. 2001 Dec. 4; 98(25):14440-5. Notably, FBXO32 has been shown to be required for muscle atrophy that is induced by a variety of conditions. For example, in animal models, FBXO32 deficiency prevented muscle atrophy caused by denervation. Small hairpin RNAs (shRNAs) targeting FBXO32 blocked muscle loss induced by fasting in mice. Knockout of FBXO32 also prevented glucocorticoid treatment-induced muscle atrophy. Whereas wild-type mice treated with the synthetic glucocorticoid dexamethasone had decreased wet weight of the triceps surae and tibialis anterior muscles, FBXO32 knockout mice had no muscle sparing. FBXO32 is also a biomarker for cancer cachexia. Furthermore, knockout of FBXO32 prevented myostatin-induced growth inhibition in primary myoblasts. See, e.g., Bodine et al., Science. 2001 Nov. 23; 294(5547):1704-8; Cong et al., Hum Gene Ther. 2011 March; 22(3):313-24; Baehr et al., J Physiol. 2011 Oct. 1; 589(Pt 19):4759-76; and Lokireddy et al., Am J Physiol Cell Physiol 303: C512-C529, 2012; Sukari et al., Semin Cancer Biol. 2016 February; 36:95-104; Wang et al., Diabetes. 2010 August; 59(8):1879-89. Further, it has been shown that FBXO32 disrupts Akt-dependent pathways responsible for physiologic cardiac hypertrophy (see, e.g., Li et al., J Clin Invest. 2007 Nov. 1; 117(11): 3211-3223). Overexpression of FBXO32 in cardiac muscle may afford therapeutic values for cardiac hypertrophy.

[0143] TRIM63 is a member of the RING finger protein family and may be referred to as Muscle-specific RING finger protein 1 (MuRF1). Like FBXO32, TRIM63 is a E3 ubiquitin ligase that is predominantly expressed in muscle, including skeletal, cardiac, and smooth muscle, and the iris. For example, TRIM63 may be detected in the M-line and Z-line lattices of myofibrils.

[0144] Several studies have implicated TRIM63 in muscle atrophy. For example, TRIM63 has been shown to be required for skeletal muscle atrophy. Mice that were deficient in TRIM63 did not develop muscle atrophy. See, e.g., Bodine et al., Science. 2001 Nov. 23; 294(5547):1704-8. Whereas wild-type mice showed significant muscle atrophy when treated with a synthetic glucocorticoid (dexamethasone), TRIM63 null mice showed muscle sparing. Knockout of TRIM63 may maintain protein synthesis in mice, suggesting that TRIM63 is capable of regulating cellular protein levels in a proteasome-independent manner. See, e.g., Bodine et al., J Physiol. 2011 Oct. 1; 589(Pt 19):4759-76. TRIM63 has been shown to degrade myosin heavy chain protein under dexamethasone-induced atrophy conditions and mice with knockout of TRIM63 show less myosin heavy chain protein degradation than wild-type mice. See, e.g., Clarke et al., Cell Metab. 2007 November; 6(5):376-85. Similarly, muscles lose myosin-binding protein C (MyBP-C) and myosin light chains 1 and 2 (MyLC1 and MyLC2) from myofibrils when muscle atrophy is induced by denervation or fasting. Loss of MyBP-C, MyLC1, and MyLC2 occur in a TRIM63-dependent manner. See, e.g., Cohen et al., J Cell Biol. 2009 Jun. 15; 185(6):1083-95. miRNA-based short hairpin RNAs (shRNAs) targeting TRIM63 and genetic knockout of TRIM63 have also been used to determine the role of TRIM63 in acute lung injury-associated skeletal muscle atrophy. TRIM63 deficiency attenuated muscle wasting induced by acute lung injury. See, e.g., Files et al., Am J Respir Crit Care Med. 2012 Apr. 15; 185(8):825-34.

[0145] Some aspects of the present disclosure relate to a recognition that while certain molecular payloads (e.g., oligonucleotides, peptides, small molecules) can have beneficial effects in muscle cells, it has proven challenging to effectively target such cells. As described herein, the present disclosure provides complexes comprising muscle-targeting agents covalently linked to molecular payloads in order to overcome such challenges. In some embodiments, the complexes are particularly useful for delivering molecular payloads that inhibit the expression or activity of target genes in muscle cells, e.g., in a subject having or suspected of having a rare muscle disease. In some embodiments, complexes provided herein are designed to target cardiac muscle cells or cardiac muscle tissues. For example, in some embodiments, complexes are provided for targeting a MEF2D, KLF15, MED1, MED13, or PPP1R3A gene to treat subjects having a muscular disease or a heart disease.

[0146] MEF2D is a member of the myocyte-specific enhancer factor 2 (MEF2) family of transcription factors. Alternative splicing MEF2D mRNA results in multiple transcript variants, a ubiquitous isoform and a tissue-specific isoform primarily detected in muscle tissue.

[0147] Krüppel-like factor 15 (KLF15) is a protein that belongs to the Krüppel family of transcription factors and can function as either a repressor or activator of gene transcription. Expression levels of KLF15 are increased by glucocorticoid signaling and blood levels of insulin. In muscle tissues, levels of KLF15 increase in response to exercise and control the ability of muscle tissue to burn fat and generate force. KLF15 specifically interacts with MEF2 and synergistically activates the GLUT4 promoter via an intact KLF15-binding site proximal to the MEF2A site. miR-133 targets KLF15 in cardiac and skeletal muscles to regulate the expression of GLUT4. KLF15 inhibits cardiac hypertrophy by repressing the activity of MEF2 and other cardiac transcription factors (e.g., GATA4 and myocardin). Expression levels of KLF15 are reduced in failing human hearts and in human aortic aneurysm tissues. Accordingly, KLF15 is involved in metabolic control in cardiomyocytes and skeletal muscle tissues and is a therapeutic target for cardiac diseases such as cardiac hypertrophy and cardiac failure (e.g., following a myocardial infarction; see, e.g., Zhao, Y. et al., “Multiple roles of KLF15 in the heart: Underlying mechanisms and therapeutic implications.” J Mol Cell Cardiol. 2019 April; 129:193-196; the contents of which are incorporated herein by reference in its entirety). KLF15 expression levels also impacts how potassium flows out of heart cells. It has been shown that elevated or reduced levels of KLF15 may result in heart arrhythmias.

[0148] The Mediator (MED) complex is regulator of eukaryotic gene transcription. Recent studies have further demonstrated that several subunits of the MED complex including MED1, MED13, MED14, MED15, MED23, MED25 and CDK8 play important regulatory roles in metabolism (e.g., glucose and lipid metabolism). In part due to their import in metabolism, some of these subunits (e.g., MED1 and MED13) have been linked to cardiovascular diseases (e.g., human congenital heart diseases). However, targeting MED subunits (e.g., MED1 and MED13) with small molecule inhibitors has proven challenging. New methods and compositions for targeting the Mediator complex (e.g., subunits such as MED1 and MED13), e.g., for treating cardiovascular diseases, are needed.

[0149] The glycogen-associated form of protein phosphatase-1 (PP1) derived from skeletal muscle is a heterodimer composed of a 37-kDa catalytic subunit (OMIM entry 176875) and a 124-kDa targeting and regulatory subunit, referred to as protein phosphatase 1 regulatory subunit 3A (PPP1R3A). PPP1R3A binds to muscle glycogen with high affinity and enhances dephosphorylation of glycogen-bound substrates for PP1 such as glycogen synthase and glycogen phosphorylase kinase. PPP1R3A is a central regulator in heart failure and is implicated in cardiomyocyte metabolic pathways.

[0150] Further aspects of the disclosure, including a description of defined terms, are provided below.

### I. Definitions

[0151] ACVR1: As used herein, the term “ACVR1”, “ALK2”, or “ALK-2” refers to a gene that encodes activin A receptor type 1, a protein receptor involved in the bone morphogenesis among other functions. In some embodiments, ACVR1 may be a human (Gene ID: 90) (e.g., SEQ ID NO: 429), non-human primate (e.g., Gene ID: 697935 (e.g., SEQ ID NO: 423), Gene ID: 470565 (e.g., SEQ ID NO: 424), Gene ID: 102134051 (e.g., SEQ ID NO: 425)), or rodent gene (e.g., Gene ID: 11477 (e.g., SEQ ID NO: 430), Gene ID: 79558 (e.g., SEQ ID NO: 426)). In humans, several genetic mutations in the gene that lead to alterations in the ACVR1 protein, e.g., L196P, R202I, R206H, Q207E, G328R, G328W, G328E, G356D, R375P, ΔP197-F198, are associated with FOP (e.g., as described in Haupt et al., Bone. 2018 April; 109: 232-240). In addition, multiple human transcript variants (e.g., as annotated under GenBank RefSeq Accession Numbers: NM_001105.5 (SEQ ID NO: 429), NM_001111067.4 (SEQ ID NO: 427), NM_001347663.1 (SEQ ID NO: 217), NM_001347664.1 (SEQ ID NO: 218), NM_001347665.1 (SEQ ID NO: 219), NM_001347666.1 (SEQ ID NO: 220), and NM_001347667.2 (SEQ ID NO: 221)) have been characterized that encode different protein isoforms. An exemplary ACVR1 protein, encoded by a human ACVR1 gene, is annotated under NCBI Reference Sequence: NP_001096.1, and has the following amino acid sequence:

(SEQ ID NO: 428)
MVDGVMILPVLIMIALPSPSMEDEKPKVNPKLYMCVCEGLSCGNEDHCE
GQQCFSSLSINDGFHVYQKGCFQVYEQGKMTCKTPPSPGQAVECCQGDW
CNRNITAQLPTKGKSFPGTQNFHLEVGLIILSVVFAVCLLACLLGVALR
KFKRRNQERLNPRDVEYGTIEGLITTNVGDSTLADLLDHSCTSGSGSGL
PFLVQRTVARQITLLECVGKGRYGEVWRGSWQGENVAVKIFSSRDEKSW
FRETELYNTVMLRHENILGFIASDMTSRHSSTQLWLITHYHEMGSLYDY
LQLTTLDTVSCLRIVLSIASGLAHLHIEIFGTQGKPAIAHRDLKSKNIL
VKKNGQCCIADLGLAVMHSQSTNQLDVGNNPRVGTKRYMAPEVLDETIQ
VDCFDSYKRVDIWAFGLVLWEVARRMVSNGIVEDYKPPFYDVVPNDPSF
EDMRKVVCVDQQRPNIPNRWFSDPTLTSLAKLMKECWYQNPSARLTALR
IKKTLTKIDNSLDKLKTDC

[0152] ACVR1B: As used herein, the term, “ACVR1B” or “ALK-4” refers to a gene that encodes activin A receptor type 1B. ACVR1B is a transmembrane serine/threonine kinase activin type-1 receptor that interacts with activin receptor type-2 to form an activin receptor complex to enable activin signaling. In some embodiments, ACVR1B may be a human (Gene ID: 91) (e.g., SEQ ID NOs: 367-368), non-human primate (e.g., Gene ID: 696587 (e.g., SEQ ID NO: 384), Gene ID: 101865702 (e.g., SEQ ID NO: 385)), or rodent gene (e.g., Gene ID: 11479 (e.g., SEQ ID NO: 369), Gene ID: 29381 (e.g., SEQ ID NO: 370)). In addition, multiple exemplary human transcripts (e.g., as annotated under GenBank RefSeq Accession Number: NM_004302.5 (SEQ ID NO: 367), NM_020327.3 (SEQ ID NO: 386), NM_020328.4 (SEQ ID NO: 387), XM_017020201.2 (SEQ ID NO: 388), XM_011538966.3 (SEQ ID NO: 389), and XM_011538967.3 (SEQ ID NO: 390)) have been characterized. Exemplary ACVR1B proteins, encoded by a human ACVR1B gene, are annotated under NCBI Reference Sequences: NP_004293.1 (SEQ ID NO: 142), NP_064732.3 (SEQ ID NO: 143), and NP_064733.3 (SEQ ID NO: 144), and have the following amino acid sequences:

NP_004293.1
(SEQ ID NO: 142)
MAESAGASSFFPLVVLLLAGSGGSGPRGVQALLCACTSCLQANYTCETD
GACMVSIFNLDGMEHHVRTCIPKVELVPAGKPFYCLSSEDLRNTHCCYT
DYCNRIDLRVPSGHLKEPEHPSMWGPVELVGIIAGPVFLLFLIIIIVFL
VINYHQRVYHNRQRLDMEDPSCEMCLSKDKTLQDLVYDLSTSGSGSGLP
LFVQRTVARTIVLQEIIGKGRFGEVWRGRWRGGDVAVKIFSSREERSWF
REAEIYQTVMLRHENILGFIAADNKDNGTWTQLWLVSDYHEHGSLFDYL
NRYTVTIEGMIKLALSAASGLAHLHMEIVGTQGKPGIAHRDLKSKNILV
KKNGMCAIADLGLAVRHDAVTDTIDIAPNQRVGTKRYMAPEVLDETINM
KHFDSFKCADIYALGLVYWEIARRCNSGGVHEEYQLPYYDLVPSDPSIE
EMRKVVCDQKLRPNIPNWWQSYEALRVMGKMMRECWYANGAARLTALRI
KKTLSQLSVQEDVKI
NP_064732.3
(SEQ ID NO: 143)
MVSIFNLDGMEHHVRTCIPKVELVPAGKPFYCLSSEDLRNTHCCYTDYC
NRIDLRVPSGHLKEPEHPSMWGPVELVGIIAGPVFLLFLIIIIVFLVIN
YHQRVYHNRQRLDMEDPSCEMCLSKDKTLQDLVYDLSTSGSGSGLPLFV
QRTVARTIVLQEIIGKGRFGEVWRGRWRGGDVAVKIFSSREERSWFREA
EIYQTVMLRHENILGFIAADNKDNGTWTQLWLVSDYHEHGSLFDYLNRY
TVTIEGMIKLALSAASGLAHLHMEIVGTQGKPGIAHRDLKSKNILVKKN
GMCAIADLGLAVRHDAVTDTIDIAPNQRVGTKRYMAPEVLDETINMKHF
DSFKCADIYALGLVYWEIARRCNSGGVHEEYQLPYYDLVPSDPSIEEMR
KVVCDQKLRPNIPNWWQSYEALRVMGKMMRECWYANGAARLTALRIKKT
LSQLSVQEDVKI
NP_064733.3
(SEQ ID NO: 144)
MAESAGASSFFPLVVLLLAGSGGSGPRGVQALLCACTSCLQANYTCETD
GACMVSIFNLDGMEHHVRTCIPKVELVPAGKPFYCLSSEDLRNTHCCYT
DYCNRIDLRVPSGHLKEPEHPSMWGPVELVGIIAGPVFLLFLIIIIVFL
VINYHQRVYHNRQRLDMEDPSCEMCLSKDKTLQDLVYDLSTSGSGSGLP
LFVQRTVARTIVLQEIIGKGRFGEVWRGRWRGGDVAVKIFSSREERSWF
REAEIYQTVMLRHENILGFIAADNKADCSFLTLPWEVVMVSAAPKLRSL
RLQYKGGRGRARFLFPLNNGTWTQLWLVSDYHEHGSLFDYLNRYTVTIE
GMIKLALSAASGLAHLHMEIVGTQGKPGIAHRDLKSKNILVKKNGMCAI
ADLGLAVRHDAVTDTIDIAPNQRVGTKRYMAPEVLDETINMKHFDSFKC
ADIYALGLVYWEIARRCNSGGVHEEYQLPYYDLVPSDPSIEEMRKVVCD
QKLRPNIPNWWQSYEALRVMGKMMRECWYANGAARLTALRIKKTLSQLS
VQEDVKI

[0153] Administering: As used herein, the terms “administering” or “administration” means to provide a complex to a subject in a manner that is physiologically and/or pharmacologically useful (e.g., to treat a condition in the subject).

[0154] Approximately: As used herein, the term “approximately” or “about,” as applied to one or more values of interest, refers to a value that is similar to a stated reference value. In certain embodiments, the term “approximately” or “about” refers to a range of values that fall within 15%, 14%, 13%, 12%, 11%, 10%, 9%, 8%, 7%, 6%, 5%, 4%, 3%, 2%, 1%, or less in either direction (greater than or less than) of the stated reference value unless otherwise stated or otherwise evident from the context (except where such number would exceed 100% of a possible value).

[0155] Antibody: As used herein, the term “antibody” refers to a polypeptide that includes at least one immunoglobulin variable domain or at least one antigenic determinant, e.g., paratope that specifically binds to an antigen. In some embodiments, an antibody is a full-length antibody. In some embodiments, an antibody is a chimeric antibody. In some embodiments, an antibody is a humanized antibody. However, in some embodiments, an antibody is a Fab fragment, a F(ab′)2 fragment, a Fv fragment or a scFv fragment. In some embodiments, an antibody is a nanobody derived from a camelid antibody or a nanobody derived from shark antibody. In some embodiments, an antibody is a diabody. In some embodiments, an antibody comprises a framework having a human germline sequence. In another embodiment, an antibody comprises a heavy chain constant domain selected from the group consisting of IgG, IgG1, IgG2, IgG2A, IgG2B, IgG2C, IgG3, IgG4, IgA1, IgA2, IgD, IgM, and IgE constant domains. In some embodiments, an antibody comprises a heavy (H) chain variable region (abbreviated herein as VH), and/or a light (L) chain variable region (abbreviated herein as VL). In some embodiments, an antibody comprises a constant domain, e.g., an Fc region. An immunoglobulin constant domain refers to a heavy or light chain constant domain. Human IgG heavy chain and light chain constant domain amino acid sequences and their functional variations are known. With respect to the heavy chain, in some embodiments, the heavy chain of an antibody described herein can be an alpha (α), delta (Δ), epsilon (ε), gamma (γ) or mu (μ) heavy chain. In some embodiments, the heavy chain of an antibody described herein can comprise a human alpha (α), delta (Δ), epsilon (ε), gamma (γ) or mu (μ) heavy chain. In a particular embodiment, an antibody described herein comprises a human gamma 1 CH1, CH2, and/or CH3 domain. In some embodiments, the amino acid sequence of the VH domain comprises the amino acid sequence of a human gamma (γ) heavy chain constant region, such as any known in the art. Non-limiting examples of human constant region sequences have been described in the art, e.g., see U.S. Pat. No. 5,693,780 and Kabat E A et al., (1991) supra. In some embodiments, the VH domain comprises an amino acid sequence that is at least 70%, 75%, 80%, 85%, 90%, 95%, 98%, or at least 99% identical to any of the variable chain constant regions provided herein. In some embodiments, an antibody is modified, e.g., modified via glycosylation, phosphorylation, sumoylation, and/or methylation. In some embodiments, an antibody is a glycosylated antibody, which is conjugated to one or more sugar or carbohydrate molecules. In some embodiments, the one or more sugar or carbohydrate molecule are conjugated to the antibody via N-glycosylation, O-glycosylation, C-glycosylation, glypiation (GPI anchor attachment), and/or phosphoglycosylation. In some embodiments, the one or more sugar or carbohydrate molecule are monosaccharides, disaccharides, oligosaccharides, or glycans. In some embodiments, the one or more sugar or carbohydrate molecule is a branched oligosaccharide or a branched glycan. In some embodiments, the one or more sugar or carbohydrate molecule includes a mannose unit, a glucose unit, an N-acetylglucosamine unit, an N-acetylgalactosamine unit, a galactose unit, a fucose unit, or a phospholipid unit. In some embodiments, an antibody is a construct that comprises a polypeptide comprising one or more antigen binding fragments of the disclosure linked to a linker polypeptide or an immunoglobulin constant domain. Linker polypeptides comprise two or more amino acid residues joined by peptide bonds and are used to link one or more antigen binding portions. Examples of linker polypeptides have been reported (see e.g., Holliger, P., et al. (1993) Proc. Natl. Acad. Sci. USA 90:6444-6448; Poljak, R. J., et al. (1994) Structure 2:1121-1123). Still further, an antibody may be part of a larger immunoadhesion molecule, formed by covalent or noncovalent association of the antibody or antibody portion with one or more other proteins or peptides. Examples of such immunoadhesion molecules include use of the streptavidin core region to make a tetrameric scFv molecule (Kipriyanov, S. M., et al. (1995) Human Antibodies and Hybridomas 6:93-101) and use of a cysteine residue, a marker peptide and a C-terminal polyhistidine tag to make bivalent and biotinylated scFv molecules (Kipriyanov, S. M., et al. (1994) Mol. Immunol. 31:1047-1058).

[0156] CDR: As used herein, the term “CDR” refers to the complementarity determining region within antibody variable sequences. A typical antibody molecule comprises a heavy chain variable region (VH) and a light chain variable region (VL), which are usually involved in antigen binding. The VH and VL regions can be further subdivided into regions of hypervariability, also known as “complementarity determining regions” (“CDR”), interspersed with regions that are more conserved, which are known as “framework regions” (“FR”). Each VH and VL is typically composed of three CDRs and four FRs, arranged from amino-terminus to carboxy-terminus in the following order: FR1, CDR1, FR2, CDR2, FR3, CDR3, FR4. The extent of the framework region and CDRs can be precisely identified using methodology known in the art, for example, by the Kabat definition, the IMGT definition, the Chothia definition, the AbM definition, and/or (e.g., and) the contact definition, all of which are well known in the art. See, e.g., Kabat, E. A., et al. (1991) Sequences of Proteins of Immunological Interest, Fifth Edition, U.S. Department of Health and Human Services, NIH Publication No. 91-3242; IMGT®, the international ImMunoGeneTics information System® www.imgt.org, Lefranc, M.-P. et al., Nucleic Acids Res., 27:209-212 (1999); Ruiz, M. et al., Nucleic Acids Res., 28:219-221 (2000); Lefranc, M.-P., Nucleic Acids Res., 29:207-209 (2001); Lefranc, M.-P., Nucleic Acids Res., 31:307-310 (2003); Lefranc, M.-P. et al., In Silico Biol., 5, 0006 (2004) [Epub], 5:45-60 (2005); Lefranc, M.-P. et al., Nucleic Acids Res., 33:D593-597 (2005); Lefranc, M.-P. et al., Nucleic Acids Res., 37:D1006-1012 (2009); Lefranc, M.-P. et al., Nucleic Acids Res., 43:D413-422 (2015); Chothia et al., (1989) Nature 342:877; Chothia, C. et al. (1987) J. Mol. Biol. 196:901-917, Al-lazikani et al (1997) J. Molec. Biol. 273:927-948; and Almagro, J. Mol. Recognit. 17:132-143 (2004). See also hgmp.mrc.ac.uk and bioinf.org.uk/abs. As used herein, a CDR may refer to the CDR defined by any method known in the art. Two antibodies having the same CDR means that the two antibodies have the same amino acid sequence of that CDR as determined by the same method, for example, the IMGT definition.

[0157] There are three CDRs in each of the variable regions of the heavy chain and the light chain, which are designated CDR1, CDR2 and CDR3, for each of the variable regions. The term “CDR set” as used herein refers to a group of three CDRs that occur in a single variable region capable of binding the antigen. The exact boundaries of these CDRs have been defined differently according to different systems. The system described by Kabat (Kabat et al., Sequences of Proteins of Immunological Interest (National Institutes of Health, Bethesda, Md. (1987) and (1991)) not only provides an unambiguous residue numbering system applicable to any variable region of an antibody, but also provides precise residue boundaries defining the three CDRs. These CDRs may be referred to as Kabat CDRs. Sub-portions of CDRs may be designated as L1, L2 and L3 or H1, H2 and H3 where the “L” and the “H” designates the light chain and the heavy chains regions, respectively. These regions may be referred to as Chothia CDRs, which have boundaries that overlap with Kabat CDRs. Other boundaries defining CDRs overlapping with the Kabat CDRs have been described by Padlan (FASEB J. 9:133-139 (1995)) and MacCallum (J Mol Biol 262(5):732-45 (1996)). Still other CDR boundary definitions may not strictly follow one of the above systems, but will nonetheless overlap with the Kabat CDRs, although they may be shortened or lengthened in light of prediction or experimental findings that particular residues or groups of residues or even entire CDRs do not significantly impact antigen binding. The methods used herein may utilize CDRs defined according to any of these systems. Examples of CDR definition systems are provided in Table 1.

TABLE 1
CDR Definitions

| | IMGT¹ | Kabat² | Chothia³ |
|---|---|---|---|
| CDR-H1 | 27-38 | 31-35 | 26-32 |
| CDR-H2 | 56-65 | 50-65 | 53-55 |
| CDR-H3 | 105-116/117 | 95-102 | 96-101 |
| CDR-L1 | 27-38 | 24-34 | 26-32 |
| CDR-L2 | 56-65 | 50-56 | 50-52 |
| CDR-L3 | 105-116/117 | 89-97 | 91-96 |

¹IMGT ®, the international ImMunoGeneTics information system ®, imgt.org, Lefranc, M.-P. et al., Nucleic Acids Res., 27:209-212 (1999)
²Kabat et al. (1991) Sequences of Proteins of Immunological Interest, Fifth Edition, U.S. Department of Health and Human Services, NIH Publication No. 91-3242
³Chothia et al., J. Mol. Biol. 196: 901-917 (1987))

[0158] CDR-grafted antibody: The term “CDR-grafted antibody” refers to antibodies which comprise heavy and light chain variable region sequences from one species but in which the sequences of one or more of the CDR regions of VH and/or VL are replaced with CDR sequences of another species, such as antibodies having murine heavy and light chain variable regions in which one or more of the murine CDRs (e.g., CDR3) has been replaced with human CDR sequences.

[0159] Chimeric antibody: The term “chimeric antibody” refers to antibodies which comprise heavy and light chain variable region sequences from one species and constant region sequences from another species, such as antibodies having murine heavy and light chain variable regions linked to human constant regions.

[0160] Complementary: As used herein, the term “complementary” refers to the capacity for precise pairing between two nucleosides or two sets of nucleosides. In particular, complementary is a term that characterizes an extent of hydrogen bond pairing that brings about binding between two nucleosides or two sets of nucleosides. For example, if a base at one position of an oligonucleotide is capable of hydrogen bonding with a base at the corresponding position of a target nucleic acid (e.g., an mRNA), then the bases are considered to be complementary to each other at that position. Base pairings may include both canonical Watson-Crick base pairing and non-Watson-Crick base pairing (e.g., Wobble base pairing and Hoogsteen base pairing). For example, in some embodiments, for complementary base pairings, adenosine-type bases (A) are complementary to thymidine-type bases (T) or uracil-type bases (U), that cytosine-type bases (C) are complementary to guanosine-type bases (G), and that universal bases such as 3-nitropyrrole or 5-nitroindole can hybridize to and are considered complementary to any A, C, U, or T. Inosine (I) has also been considered in the art to be a universal base and is considered complementary to any A, C, U or T.

[0161] Conservative amino acid substitution: As used herein, a “conservative amino acid substitution” refers to an amino acid substitution that does not alter the relative charge or size characteristics of the protein in which the amino acid substitution is made. Variants can be prepared according to methods for altering polypeptide sequence known to one of ordinary skill in the art such as are found in references which compile such methods, e.g. Molecular Cloning: A Laboratory Manual, J. Sambrook, et al., eds., Fourth Edition, Cold Spring Harbor Laboratory Press, Cold Spring Harbor, N.Y., 2012, or Current Protocols in Molecular Biology, F. M. Ausubel, et al., eds., John Wiley & Sons, Inc., New York. Conservative substitutions of amino acids include substitutions made amongst amino acids within the following groups: (a) M, I, L, V; (b) F, Y, W; (c) K, R, H; (d) A, G; (e) S, T; (f) Q, N; and (g) E, D.

[0162] Covalently linked: As used herein, the term “covalently linked” refers to a characteristic of two or more molecules being linked together via at least one covalent bond. In some embodiments, two molecules can be covalently linked together by a single bond, e.g., a disulfide bond or disulfide bridge, that serves as a linker between the molecules. However, in some embodiments, two or more molecules can be covalently linked together via a molecule that serves as a linker that joins the two or more molecules together through multiple covalent bonds. In some embodiments, a linker may be a cleavable linker. However, in some embodiments, a linker may be a non-cleavable linker.

[0163] Cross-reactive: As used herein and in the context of a targeting agent (e.g., antibody), the term “cross-reactive,” refers to a property of the agent being capable of specifically binding to more than one antigen of a similar type or class (e.g., antigens of multiple homologs, paralogs, or orthologs) with similar affinity or avidity. For example, in some embodiments, an antibody that is cross-reactive against human and non-human primate antigens of a similar type or class (e.g., a human transferrin receptor and non-human primate transferrin receptor) is capable of binding to the human antigen and non-human primate antigens with a similar affinity or avidity. In some embodiments, an antibody is cross-reactive against a human antigen and a rodent antigen of a similar type or class. In some embodiments, an antibody is cross-reactive against a rodent antigen and a non-human primate antigen of a similar type or class. In some embodiments, an antibody is cross-reactive against a human antigen, a non-human primate antigen, and a rodent antigen of a similar type or class.

[0164] Disease allele: As used herein, the term “disease allele” refers to any one of alternative forms (e.g., mutant forms) of a gene, such as, but not limited to, a MLCK1 gene, an ACVR1 gene, or a FBXO32 gene, for which the allele is correlated with and/or directly or indirectly contributes to, or causes, disease. A disease allele may comprise gene alterations including, but not limited to, insertions, deletions, missense mutations, nonsense mutations and splice-site mutations relative to a wild-type (non-disease) allele. In some embodiments, a disease allele has a loss-of-function mutation. In some embodiments, a disease allele has a gain-of-function mutation. In some embodiments, a disease allele encodes an activating mutation (e.g., encodes a protein that is constitutively active). In some embodiments, a disease allele is a recessive allele having a recessive phenotype. In some embodiments, a disease allele is a dominant allele having a dominant phenotype. In some embodiments, a disease allele has a loss-of-function mutation in a gene encoding MLCK1 (MYLK). In some embodiments, a loss-of-function mutation is as described in Halim D. et al. “Loss-of-Function Variants in MYLK Cause Recessive Megacystis Microcolon Intestinal Hypoperistalsis Syndrome.” Am J Hum Genet. 2017 Jul. 6; 101(1):123-129; Hannuksela M. et al. “A novel variant in MYLK causes thoracic aortic dissections: genotypic and phenotypic description.” BMC Med Genet. 2016 Sep. 1; 17(1):61; or Shalata, A. et al. “Fatal thoracic aortic aneurysm and dissection in a large family with a novel MYLK gene mutation: delineation of the clinical phenotype.” Orphanet J Rare Dis. 2018 Mar. 15; 13(1):41; the contents of each of which are incorporated herein by reference. In some embodiments, a disease allele has a gain-of-function mutation. In some embodiments, a disease allele encodes an activating mutation (e.g., encodes a protein that is constitutively active). In some embodiments, a disease allele is a recessive allele having a recessive phenotype. In some embodiments, a disease allele is a dominant allele having a dominant phenotype. In some embodiments, a disease allele comprises a duplication (e.g., a 7 base pair duplication (c.3838_3844dupGAAAGCG)), a splice-site variant (e.g., c.3985+5C>A), a deletion (e.g., a 2-bp deletion (c3272_3273del, p.Ser1091*)), or a missense mutation (e.g., a missense mutation at c.4471G>T (Ala1491Ser)). In some embodiments, a disease allele may comprise one or more deletions or substitutions that lead to alterations in the ACVR1 protein, e.g., L196P, R202I, R206H, Q207E, G328R, G328W, G328E, G356D, R375P, ΔP197-F198. In some embodiments, a subject may have Fibrodysplasia ossificans progressiva (FOP). In some embodiments, a subject having FOP may have one or two mutated ACVR1 alleles. In some embodiments, a subject having classic or typical FOP has an ACVR1 allele comprising a mutation that leads to R206H ACVR1 protein. In some embodiments, a subject having atypical FOP has an ACVR1 allele comprising at least one mutation that leads to mutated ACVR1 protein that does not comprise the R206H mutation. In some embodiments, a diseased allele of MEF2D is an isoform of MEF2D lacking the β-exon and is associated with muscle degeneration disorders such as myotonic dystrophy (e.g., as described in Lee et al., The Journal of Biological Chemistry, 285, 33779-33787, 2010, incorporated herein by reference). In some embodiments, a disease allele of MED13 comprises a missense mutation. In some embodiments a disease allele of MED13 encodes a T326I, P327S and/or P327Q mutation. In some embodiments, a disease allele of MED13 comprises an in-frame deletion (e.g., of nucleotides encoding T326). In some embodiments, the disease MED13 allele is as described in Snijders Blok L., et. al, “De novo mutations in MED13, a component of the Mediator complex, are associated with a novel neurodevelopmental disorder” Hum. Genet. 2018, 137:375-388.; the contents of which are incorporated herein by reference.

[0165] FBXO32: As used herein, the term, “FBXO32,” refers to a gene that encodes a F-box adaptor protein ad is a member of SKP1-cullin-F-box (SCF) ubiquitin protein ligase complex. FBXO32 can bind substrates for ubiquitination by the SCF complex. In some embodiments, FBXO32 may be a human (Gene ID: 114907 (e.g., SEQ ID NO: 505).), non-human primate (e.g., Gene ID: 102141240 (e.g., SEQ ID NO: 653)), or rodent gene (e.g., Gene ID: 67731 (e.g., SEQ ID NO: 506), Gene ID: 171043 (e.g., SEQ ID NO: 654)). In addition, exemplary human transcripts (e.g., as annotated under GenBank RefSeq Accession Number: NM_058229.4 (SEQ ID NO: 505), NM_001242463.2 (SEQ ID NO: 655), and NM_148177.2 (SEQ ID NO: 656)) have been characterized. An exemplary FBXO32 protein, encoded by a human FBXO32 gene, is annotated under NCBI Reference Sequence: NP_478136.1, and has the following amino acid sequence:

(SEQ ID NO: 503)
MPFLGQDWRSPGQNWVKTADGWKRFLDEKSGSFVSDLSSYCNKEVYNKE
NLFNSLNYDVAAKKRKKDMLNSKTKTQYFHQEKWIYVHKGSTKERHGYC
TLGEAFNRLDFSTAILDSRRFNYVVRLLELIAKSQLTSLSGIAQKNFMN
ILEKVVLKVLEDQQNIRLIRELLQTLYTSLCTLVQRVGKSVLVGNINMW
VYRMETILHWQQQLNNIQITRPAFKGLTFTDLPLCLQLNIMQRLSDGRD
LVSLGQAAPDLHVLSEDRLLWKKLCQYHFSERQIRKRLILSDKGQLDWK
KMYFKLVRCYPRKEQYGDTLQLCKHCHILSWKGTDHPCTANNPESCSVS
LSPQDFINLFKF.

[0166] Framework: As used herein, the term “framework” or “framework sequence” refers to the remaining sequences of a variable region minus the CDRs. Because the exact definition of a CDR sequence can be determined by different systems, the meaning of a framework sequence is subject to correspondingly different interpretations. The six CDRs (CDR-L1, CDR-L2, and CDR-L3 of light chain and CDR-H1, CDR-H2, and CDR-H3 of heavy chain) also divide the framework regions on the light chain and the heavy chain into four sub-regions (FR1, FR2, FR3 and FR4) on each chain, in which CDR1 is positioned between FR1 and FR2, CDR2 between FR2 and FR3, and CDR3 between FR3 and FR4. Without specifying the particular sub-regions as FR1, FR2, FR3 or FR4, a framework region, as referred by others, represents the combined FRs within the variable region of a single, naturally occurring immunoglobulin chain. As used herein, a FR represents one of the four sub-regions, and FRs represents two or more of the four sub-regions constituting a framework region. Human heavy chain and light chain acceptor sequences are known in the art. In one embodiment, the acceptor sequences known in the art may be used in the antibodies disclosed herein.

[0167] Human antibody: The term “human antibody”, as used herein, is intended to include antibodies having variable and constant regions derived from human germline immunoglobulin sequences. The human antibodies of the disclosure may include amino acid residues not encoded by human germline immunoglobulin sequences (e.g., mutations introduced by random or site-specific mutagenesis in vitro or by somatic mutation in vivo), for example in the CDRs and in particular CDR3. However, the term “human antibody”, as used herein, is not intended to include antibodies in which CDR sequences derived from the germline of another mammalian species, such as a mouse, have been grafted onto human framework sequences.

[0168] Humanized antibody: The term “humanized antibody” refers to antibodies which comprise heavy and light chain variable region sequences from a non-human species (e.g., a mouse) but in which at least a portion of the VH and/or VL sequence has been altered to be more “human-like”, i.e., more similar to human germline variable sequences. One type of humanized antibody is a CDR-grafted antibody, in which human CDR sequences are introduced into non-human VH and VL sequences to replace the corresponding non-human CDR sequences. In one embodiment, humanized anti-transferrin receptor 1 antibodies and antigen binding portions are provided. Such antibodies may be generated by obtaining murine anti-transferrin receptor 1 monoclonal antibodies using traditional hybridoma technology followed by humanization using in vitro genetic engineering, such as those disclosed in Kasaian et al PCT publication No. WO 2005/123126 A2.

[0169] INHBA: As used herein, the term, “INHBA” or “inhibin, beta A” refers to a gene that encodes inhibin, beta A (INHBA). In some embodiments, an INHBA gene may be a human INHBA gene (Gene ID: 3624 (e.g., SEQ ID NO: 269)), non-human primate INHBA gene (e.g., Gene ID: 102146142 (e.g., SEQ ID NO: 391), Gene ID: 702734 (e.g., SEQ ID NO: 392)), or rodent INHBA gene (e.g., Gene ID: 16323 (e.g., SEQ ID NO: 270), Gene ID: 29200 (e.g., SEQ ID NO: 393)). In addition, an exemplary human transcript (e.g., as annotated under GenBank RefSeq Accession Number: NM_002192.4 (SEQ ID NO: 269)) has been characterized. An exemplary INHBA protein, encoded by a human INHBA gene, is annotated under NCBI Reference Sequence: NP_002183.1, and has the following amino acid sequence:

(SEQ ID NO: 145)
MPLLWLRGFLLASCWIIVRSSPTPGSEGHSAAPDCPSCALAALPKDVPN
SQPEMVEAVKKHILNMLHLKKRPDVTQPVPKAALLNAIRKLHVGKVGEN
GYVEIEDDIGRRAEMNELMEQTSEIITFAESGTARKTLHFEISKEGSDL
SVVERAEVWLFLKVPKANRTRTKVTIRLFQQQKHPQGSLDTGEEAEEVG
LKGERSELLLSEKVVDARKSTWHVFPVSSSIQRLLDQGKSSLDVRIACE
QCQESGASLVLLGKKKKKEEEGEGKKKGGGEGGAGADEEKEQSHRPFLM
LQARQSEDHPHRRRRRGLECDGKVNICCKKQFFVSFKDIGWNDWIIAPS
GYHANYCEGECPSHIAGTSGSSLSFHSTVINHYRMRGHSPFANLKSCCV
PTKLRPMSMLYYDDGQNIIKKDIQNMIVEECGCS

[0170] Internalizing cell surface receptor: As used herein, the term, “internalizing cell surface receptor” refers to a cell surface receptor that is internalized by cells, e.g., upon external stimulation, e.g., ligand binding to the receptor. In some embodiments, an internalizing cell surface receptor is internalized by endocytosis. In some embodiments, an internalizing cell surface receptor is internalized by clathrin-mediated endocytosis. However, in some embodiments, an internalizing cell surface receptor is internalized by a clathrin-independent pathway, such as, for example, phagocytosis, macropinocytosis, caveolae- and raft-mediated uptake or constitutive clathrin-independent endocytosis. In some embodiments, the internalizing cell surface receptor comprises an intracellular domain, a transmembrane domain, and/or an extracellular domain, which may optionally further comprise a ligand-binding domain. In some embodiments, a cell surface receptor becomes internalized by a cell after ligand binding. In some embodiments, a ligand may be a muscle-targeting agent or a muscle-targeting antibody. In some embodiments, an internalizing cell surface receptor is a transferrin receptor.

[0171] Isolated antibody: An “isolated antibody”, as used herein, is intended to refer to an antibody that is substantially free of other antibodies having different antigenic specificities (e.g., an isolated antibody that specifically binds transferrin receptor is substantially free of antibodies that specifically bind antigens other than transferrin receptor). An isolated antibody that specifically binds transferrin receptor complex may, however, have cross-reactivity to other antigens, such as transferrin receptor molecules from other species. Moreover, an isolated antibody may be substantially free of other cellular material and/or chemicals.

[0172] Kabat numbering: The terms “Kabat numbering”, “Kabat definitions and “Kabat labeling” are used interchangeably herein. These terms, which are recognized in the art, refer to a system of numbering amino acid residues which are more variable (i.e. hypervariable) than other amino acid residues in the heavy and light chain variable regions of an antibody, or an antigen binding portion thereof (Kabat et al. (1971) Ann. NY Acad, Sci. 190:382-391 and, Kabat, E. A., et al. (1991) Sequences of Proteins of Immunological Interest, Fifth Edition, U.S. Department of Health and Human Services, NIH Publication No. 91-3242). For the heavy chain variable region, the hypervariable region ranges from amino acid positions 31 to 35 for CDR1, amino acid positions 50 to 65 for CDR2, and amino acid positions 95 to 102 for CDR3. For the light chain variable region, the hypervariable region ranges from amino acid positions 24 to 34 for CDR1, amino acid positions 50 to 56 for CDR2, and amino acid positions 89 to 97 for CDR3.

[0173] KLF15: As used herein, the term, “KLF15,” refers to a gene that encodes Krüppel-like factor 15 protein, a transcription factor that, in cardiac and skeletal muscle cells, functions to inhibit the activity of MEF2 and other cardiac transcription factors (e.g., GATA4 and myocardin). In some embodiments, KLF15 refers to a human KLF15 (Gene ID: 28999 (e.g., SEQ ID NO: 1045)), a non-human primate KLF15 (e.g., Gene ID: 716386 (e.g., SEQ ID NO: 1046), Gene ID: 470911 (e.g., SEQ ID NO: 1047)), or rodent KLF15 (e.g., Gene ID: 66277 (e.g., SEQ ID NO: 1048), Gene ID: 85497 (e.g., SEQ ID NO: 1049)). In addition, multiple human KLF15 transcript variants (e.g., as annotated under GenBank RefSeq Accession Numbers: NM_014079.4 (SEQ ID NO: 740), XM_011512743.2 (SEQ ID NO: 1050), and XM_005247400.4 (SEQ ID NO: 1051)) have been characterized that encode different protein isoforms. An exemplary KLF15 protein isoform, encoded by a human KLF15 gene, is annotated under NCBI Reference Sequence: NP_054798.1, and has the following amino acid sequence:

(SEQ ID NO: 131)
MVDHLLPVDENFSSPKCPVGYLGDRLVGRRAYHMLPSPVSEDDSDASSP
CSCSSPDSQALCSCYGGGLGTESQDSILDFLLSQATLGSGGGSGSSIGA
SSGPVAWGPWRRAAAPVKGEHFCLPEFPLGDPDDVPRPFQPTLEEIEEF
LEENMEPGVKEVPEGNSKDLDACSQLSAGPHKSHLHPGSSGRERCSPPP
GGASAGGAQGPGGGPTPDGPIPVLLQIQPVPVKQESGTGPASPGQAPEN
VKVAQLLVNIQGQTFALVPQVVPSSNLNLPSKFVRIAPVPIAAKPVGSG
PLGPGPAGLLMGQKFPKNPAAELIKMHKCTFPGCSKMYTKSSHLKAHLR
RHTGEKPFACTWPGCGWRFSRSDELSRHRRSHSGVKPYQCPVCEKKFAR
SDHLSKHIKVHRFPRSSRSVRSVN

[0174] Mediator (MED) complex subunit: As used herein, the term “Mediator complex subunit” or “subunit of the Mediator complex” refers to an individual component of the Mediator complex. Subunits of the Mediator complex include MED1, MED13, MED14, MED15, MED23, MED25, CDK8, and others. Simple eukaryotes (e.g., Saccharomyces cerevisiae (yeast)) commonly have up to 21 MED complex subunits; while mammals typically have between 26 and 31 MED complex subunits.

[0175] MED1: As used herein, the term, “MED1,” generally refers to a gene that encodes Mediator complex subunit 1 (MED1). In some embodiments, MED1 may be a human (Gene ID: 5469 (e.g., SEQ ID NO: 1052)), non-human primate (e.g., Gene ID: 101925389 (e.g., SEQ ID NO: 1053), Gene ID: 697781 (e.g., SEQ ID NO: 1054)), or rodent gene (e.g., Gene ID: 19014 (e.g., SEQ ID NO: 1055), Gene ID: 497991 (e.g., SEQ ID NO: 1056)). In addition, an exemplary human transcript (e.g., as annotated under GenBank RefSeq Accession Number: NM_004774.4 (SEQ ID NO: 814)) has been characterized. An exemplary MED1 protein, encoded by a human MED1 gene, is annotated under NCBI Reference Sequence: NP_004765.2; and has the following amino acid sequence:

(SEQ ID NO: 138)
MKAQGETEESEKLSKMSSLLERLHAKFNQNRPWSETIKLVRQVMEKRVV
MSSGGHQHLVSCLETLQKALKVTSLPAMTDRLESIARQNGLGSHLSASG
TECYITSDMFYVEVQLDPAGQLCDVKVAHHGENPVSCPELVQQLREKNF
DEFSKHLKGLVNLYNLPGDNKLKTKMYLALQSLEQDLSKMAIMYWKATN
AGPLDKILHGSVGYLTPRSGGHLMNLKYYVSPSDLLDDKTASPIILHEN
NVSRSLGMNASVTIEGTSAVYKLPIAPLIMGSHPVDNKWTPSFSSITSA
NSVDLPACFFLKFPQPIPVSRAFVQKLQNCTGIPLFETQPTYAPLYELI
TQFELSKDPDPIPLNHNMRFYAALPGQQHCYFLNKDAPLPDGRSLQGTL
VSKITFQHPGRVPLILNLIRHQVAYNTLIGSCVKRTILKEDSPGLLQFE
VCPLSESRFSVSFQHPVNDSLVCVVMDVQDSTHVSCKLYKGLSDALICT
DDFIAKVVQRCMSIPVTMRAIRRKAETIQADTPALSLIAETVEDMVKKN
LPPASSPGYGMTTGNNPMSGTTTPTNTFPGGPITTLFNMSMSIKDRHES
VGHGEDFSKVSQNPILTSLLQITGNGGSTIGSSPTPPHHTPPPVSSMAG
NTKNHPMLMNLLKDNPAQDFSTLYGSSPLERQNSSSGSPRMEICSGSNK
TKKKKSSRLPPEKPKHQTEDDFQRELFSMDVDSQNPIFDVNMTADTLDT
PHITPAPSQCSTPPTTYPQPVPHPQPSIQRMVRLSSSDSIGPDVTDILS
DIAEEASKLPSTSDDCPAIGTPLRDSSSSGHSQSTLFDSDVFQTNNNEN
PYTDPADLIADAAGSPSSDSPTNHFFHDGVDFNPDLLNSQSQSGFGEEY
FDESSQSGDNDDFKGFASQALNTLGVPMLGGDNGETKFKGNNQADTVDF
SIISVAGKALAPADLMEHHSGSQGPLLTTGDLGKEKTQKRVKEGNGTSN
STLSGPGLDSKPGKRSRTPSNDGKSKDKPPKRKKADTEGKSPSHSSSNR
PFTPPTSTGGSKSPGSAGRSQTPPGVATPPIPKITIQIPKGTVMVGKPS
SHSQYTSSGSVSSSGSKSHHSHSSSSSSSASTSGKMKSSKSEGSSSSKL
SSSMYSSQGSSGSSQSKNSSQSGGKPGSSPITKHGLSSGSSSTKMKPQG
KPSSLMNPSLSKPNISPSHSRPPGGSDKLASPMKPVPGTPPSSKAKSPI
SSGSGGSHMSGTSSSSGMKSSSGLGSSGSLSQKTPPSSNSCTASSSSFS
SSGSSMSSSQNQHGSSKGKSPSRNKKPSLTAVIDKLKHGVVTSGPGGED
PLDGQMGVSTNSSSHPMSSKHNMSGGEFQGKREKSDKDKSKVSTSGSSV
DSSKKTSESKNVGSTGVAKIIISKHDGGSPSIKAKVTLQKPGESSGEGL
RPQMASSKNYGSPLISGSTPKHERGSPSHSKSPAYTPQNLDSESESGSS
IAEKSYQNSPSSDDGIRPLPEYSTEKHKKHKKEKKKVKDKDRDRDRDKD
RDKKKSHSIKPESWSKSPISSDQSLSMTSNTILSADRPSRLSPDFMIGE
EDDDLMDVALIGN

[0176] MED13: As used herein, the term, “MED13” or “PROSIT240” generally refers to a gene that encodes Mediator complex subunit 13 (MED13). MED13 is one component of a four-subunit kinase module of the Mediator complex that further comprises cyclin C, cyclin-dependent kinase 8 (CDK8), and MED12. In some embodiments, MED13 may be a human (Gene ID: 9969 (e.g., SEQ ID NO: 1057)), non-human primate (e.g., Gene ID: 712277 (e.g., SEQ ID NO: 1058), Gene ID: 102120434 (e.g., SEQ ID NO: 1059)), or rodent gene (e.g., Gene ID: 327987 (e.g., SEQ ID NO: 1060), Gene ID: 303403 (e.g., SEQ ID NO: 1061)). In addition, an exemplary human transcript of MED13 (e.g., as annotated under GenBank RefSeq Accession Number: NM_005121.3 (SEQ ID NO: 888)) has been characterized. An exemplary MED13 protein, encoded by a human MED13 gene, is annotated under NCBI Reference Sequence: NP_005112.2; and has the following amino acid sequence:

(SEQ ID NO: 139)
MSASFVPNGASLEDCHCNLFCLADLTGIKWKKYVWQGPTSAPILFPVTE
EDPILSSFSRCLKADVLGVWRRDQRPGRRELWIFWWGEDPSFADLIHHD
LSEEEDGVWENGLSYECRTLLFKAVHNLLERCLMNRNFVRIGKWFVKPY
EKDEKPINKSEHLSCSFTFFLHGDSNVCTSVEINQHQPVYLLSEEHITL
AQQSNSPFQVILCPFGLNGTLTGQAFKMSDSATKKLIGEWKQFYPISCC
LKEMSEEKQEDMDWEDDSLAAVEVLVAGVRMIYPACFVLVPQSDIPTPS
PVGSTHCSSSCLGVHQVPASTRDPAMSSVTLTPPTSPEEVQTVDPQSVQ
KWVKFSSVSDGFNSDSTSHHGGKIPRKLANHVVDRVWQECNMNRAQNKR
KYSASSGGLCEEATAAKVASWDFVEATQRTNCSCLRHKNLKSRNAGQQG
QAPSLGQQQQILPKHKTNEKQEKSEKPQKRPLTPFHHRVSVSDDVGMDA
DSASQRLVISAPDSQVRFSNIRTNDVAKTPQMHGTEMANSPQPPPLSPH
PCDVVDEGVTKTPSTPQSQHFYQMPTPDPLVPSKPMEDRIDSLSQSFPP
QYQEAVEPTVYVGTAVNLEEDEANIAWKYYKFPKKKDVEFLPPQLPSDK
FKDDPVGPFGQESVTSVTELMVQCKKPLKVSDELVQQYQIKNQCLSAIA
SDAEQEPKIDPYAFVEGDEEFLFPDKKDRQNSEREAGKKHKVEDGTSSV
TVLSHEEDAMSLFSPSIKQDAPRPTSHARPPSTSLIYDSDLAVSYTDLD
NLFNSDEDELTPGSKKSANGSDDKASCKESKTGNLDPLSCISTADLHKM
YPTPPSLEQHIMGFSPMNMNNKEYGSMDTTPGGTVLEGNSSSIGAQFKI
EVDEGFCSPKPSEIKDFSYVYKPENCQILVGCSMFAPLKTLPSQYLPPI
KLPEECIYRQSWTVGKLELLSSGPSMPFIKEGDGSNMDQEYGTAYTPQT
HTSFGMPPSSAPPSNSGAGILPSPSTPRFPTPRTPRTPRTPRGAGGPAS
AQGSVKYENSDLYSPASTPSTCRPLNSVEPATVPSIPEAHSLYVNLILS
ESVMNLFKDCNFDSCCICVCNMNIKGADVGVYIPDPTQEAQYRCTCGFS
AVMNRKFGNNSGLFLEDELDIIGRNTDCGKEAEKRFEALRATSAEHVNG
GLKESEKLSDDLILLLQDQCTNLFSPFGAADQDPFPKSGVISNWVRVEE
RDCCNDCYLALEHGRQFMDNMSGGKVDEALVKSSCLHPWSKRNDVSMQC
SQDILRMLLSLQPVLQDAIQKKRTVRPWGVQGPLTWQQFHKMAGRGSYG
TDESPEPLPIPTFLLGYDYDYLVLSPFALPYWERLMLEPYGSQRDIAYV
VLCPENEALLNGAKSFFRDLTAIYESCRLGQHRPVSRLLTDGIMRVGST
ASKKLSEKLVAEWFSQAADGNNEAFSKLKLYAQVCRYDLGPYLASLPLD
SSLLSQPNLVAPTSQSLITPPQMTNTGNANTPSATLASAASSTMTVTSG
VAISTSVATANSTLTTASTSSSSSSNLNSGVSSNKLPSFPPFGSMNSNA
AGSMSTQANTVQSGQLGGQQTSALQTAGISGESSSLPTQPHPDVSESTM
DRDKVGIPTDGDSHAVTYPPAIVVYIIDPFTYENTDESTNSSSVWTLGL
LRCFLEMVQTLPPHIKSTVSVQIIPCQYLLQPVKHEDREIYPQHLKSLA
FSAFTQCRRPLPTSTNVKTLTGFGPGLAMETALRSPDRPECIRLYAPPF
ILAPVKDKQTELGETFGEAGQKYNVLFVGYCLSHDQRWILASCTDLYGE
LLETCIINIDVPNRARRKKSSARKFGLQKLWEWCLGLVQMSSLPWRVVI
GRLGRIGHGELKDWSCLLSRRNLQSLSKRLKDMCRMCGISAADSPSILS
ACLVAMEPQGSFVIMPDSVSTGSVFGRSTTLNMQTSQLNTPQDTSCTHI
LVFPTSASVQVASATYTTENLDLAFNPNNDGADGMGIFDLLDTGDDLDP
DIINILPASPTGSPVHSPGSHYPHGGDAGKGQSTDRLLSTEPHEEVPNI
LQQPLALGYFVSTAKAGPLPDWFWSACPQAQYQCPLFLKASLHLHVPSV
QSDELLHSKHSHPLDSNQTSDVLRFVLEQYNALSWLTCDPATQDRRSCL
PIHFVVLNQLYNFIMNML

[0177] MEF2D: As used herein, the term, “MEF2D,” refers to a gene that encodes myocyte enhancer factor 2D, a member of the myocyte-specific enhancer factor 2 (MEF2) family of transcription factors. MEF2D binds specifically to the MEF2 element, 5′-YTA[AT]4TAR-3′, found in numerous muscle-specific, growth factor and stress induced genes. MEF2D mediates cellular functions not only in skeletal and cardiac muscle development, but also in neuronal differentiation and survival. MEF2D also plays diverse roles in the control of cell growth, survival and apoptosis and in the regulation of neuronal apoptosis. MEF2D has been shown to be play important roles in heart development and in heart diseases (e.g., cardiac hypertrophy, cardiomyopathy), and in muscular diseases (e.g., muscle atrophy, myotonic dystrophy). See e.g., Chen et al., Oncotarget. 2017 Dec. 19; 8(67): 112152-112165, incorporated herein by reference. It has been shown that reducing MEF2D activity in the heart resulted in resistance to cardiac hypertrophy, fetal gene activation, and fibrosis in response to pressure overload and β-chronic adrenergic stimulation in mice, and that overexpression of MEF2D was sufficient to drive the fetal gene program and pathological remodeling of the heart (see, e.g., Kim et al., J Clin Invest. 2008 Jan. 2; 118(1): 124-132, incorporated herein by reference). Additionally, MEF2D is involved in neuromuscular diseases, such as Parkinson's disease (see, e.g., Yao et al., The Journal of Biological Chemistry, 287, 34246-34255, 2012, incorporated herein by reference) and amyotrophic lateral sclerosis (see, e.g., Arosio et al., Molecular and Cellular Neuroscience, Volume 74, July 2016, Pages 10-17, incorporated herein by reference). In some embodiments, MEF2D refers to a human (Gene ID: 4209 (e.g., SEQ ID NO: 664)), a non-human primate (e.g., Gene ID: 102143822 (e.g., SEQ ID NO: 1062), or rodent gene (e.g., Gene ID: 17261 (e.g., SEQ ID NO: 666), Gene ID: 81518 (e.g., SEQ ID NO: 1063)). In addition, multiple human MEF2D transcript variants (e.g., as annotated under GenBank RefSeq Accession Numbers: NM_001271629.2 (SEQ ID NO: 665), NM_005920.4 (SEQ ID NO: 664), XM_006711332.3 (SEQ ID NO: 1036), XM_006711334.3 (SEQ ID NO: 1037), XM_006711333.2 (SEQ ID NO: 1038), XM_005245169.4 (SEQ ID NO: 1039), XM_017001315.1 (SEQ ID NO: 1040), XM_006711330.3 (SEQ ID NO: 1041), XM_005245170.3 (SEQ ID NO: 1042), XM_011509569.3 (SEQ ID NO: 1043), and XM_017001314.1 (SEQ ID NO: 1044)) have been characterized that encode different protein isoforms. Exemplary MEF2D protein isoforms, encoded by a human MEF2D gene, are annotated under NCBI Reference Sequence: NP_001258558.1 and NP_005911.1, and has the following amino acid sequence, respectively:

(SEQ ID NO: 140)
MGRKKIQIQRITDERNRQVTFTKRKFGLMKKAYELSVLCDCEIALIIFN
HSNKLFQYASTDMDKVLLKYTEYNEPHESRTNADIIETLRKKGFNGCDS
PEPDGEDSLEQSPLLEDKYRRASEELDGLFRRYGSTVPAPNFAMPVTVP
VSNQSSLQFSNPSGSLVTPSLVTSSLTDPRLLSPQQPALQRNSVSPGLP
QRPASAGAMLGGDLNSANGACPSPVGNGYVSARASPGLLPVANGNSLNK
VIPAKSPPPPTHSTQLGAPSRKPDLRVITSQAGKGLMHHLNNAQRLGVS
QSTHSLTTPVVSVATPSLLSQGLPFSSMPTAYNTDYQLTSAELSSLPAF
SSPGGLSLGNVTAWQQPQQPQQPQQPQPPQQQPPQPQQPQPQQPQQPQQ
PPQQQSHLVPVSLSNLIPGSPLPHVGAALTVTTHPHISIKSEPVSPSRE
RSPAPPPPAVFPAARPEPGDGLSSPAGGSYETGDRDDGRGDFGPTLGLL
RPAPEPEAEGSAVKRMRLDTWTLK
(SEQ ID NO: 141)
MGRKKIQIQRITDERNRQVTFTKRKFGLMKKAYELSVLCDCEIALIIFN
HSNKLFQYASTDMDKVLLKYTEYNEPHESRTNADIIETLRKKGFNGCDS
PEPDGEDSLEQSPLLEDKYRRASEELDGLFRRYGSTVPAPNFAMPVTVP
VSNQSSLQFSNPSGSLVTPSLVTSSLTDPRLLSPQQPALQRNSVSPGLP
QRPASAGAMLGGDLNSANGACPSPVGNGYVSARASPGLLPVANGNSLNK
VIPAKSPPPPTHSTQLGAPSRKPDLRVITSQAGKGLMHHLTEDHLDLNN
AQRLGVSQSTHSLTTPVVSVATPSLLSQGLPFSSMPTAYNTDYQLTSAE
LSSLPAFSSPGGLSLGNVTAWQQPQQPQQPQQPQPPQQQPPQPQQPQPQ
QPQQPQQPPQQQSHLVPVSLSNLIPGSPLPHVGAALTVTTHPHISIKSE
PVSPSRERSPAPPPPAVFPAARPEPGDGLSSPAGGSYETGDRDDGRGDF
GPTLGLLRPAPEPEAEGSAVKRMRLDTWTLK

[0178] Molecular payload: As used herein, the term “molecular payload” refers to a molecule or species that functions to modulate a biological outcome. In some embodiments, a molecular payload is linked to, or otherwise associated with a muscle-targeting agent. In some embodiments, the molecular payload is a small molecule, a protein, a peptide, a nucleic acid, or an oligonucleotide. In some embodiments, the molecular payload functions to modulate the transcription of a DNA sequence, to modulate the expression of a protein, or to modulate the activity of a protein. In some embodiments, the molecular payload is an oligonucleotide that comprises a strand having a region of complementarity to a target gene.

[0179] MLCK1: As used herein, the term, “MLCK1” or “MYLK1” refers to a gene that encodes myosin light chain kinase-1 protein, which is an enzyme that phosphorylates myosin regulatory light chains in order to facilitate myosin interaction with actin filaments in smooth muscle. In some embodiments, MLCK1 may be a human (Gene ID: 4638 (e.g., SEQ ID NO: 412)), non-human primate (e.g., Gene ID: 102130711 (e.g., SEQ ID NO: 413)), or rodent gene (e.g., Gene ID: 107589 (e.g., SEQ ID NO: 414), Gene ID: 288057 (e.g., SEQ ID NO: 415)). In addition, several exemplary human transcripts (e.g., as annotated under GenBank RefSeq Accession Number: NM_001321309.2 (SEQ ID NO: 416), NM_053025.4 (SEQ ID NO: 417), NM_053026.4 (SEQ ID NO: 418), NM_053027.4 (SEQ ID NO: 419), NM_053028.4 (SEQ ID NO: 420), NM_053031.4 (SEQ ID NO: 421), and NM_053032.4 (SEQ ID NO: 422)) has been characterized.

[0180] An exemplary MLCK1 protein, encoded by a human MLCK1 gene, is annotated under NCBI Reference Sequence: NP_444253.3, and has the following amino acid sequence:

(SEQ ID NO: 410)
MGDVKLVASSHISKTSLSVDPSRVDSMPLTEAPAFILPPRNLCIKEGAT
AKFEGRVRGYPEPQVTWHRNGQPITSGGRFLLDCGIRGTFSLVIHAVHE
EDRGKYTCEATNGSGARQVTVELTVEGSFAKQLGQPVVSKTLGDRFSAP
AVETRPSIWGECPPKFATKLGRVVVKEGQMGRFSCKITGRPQPQVTWLK
GNVPLQPSARVSVSEKNGMQVLEIHGVNQDDVGVYTCLVVNGSGKASMS
AELSIQGLDSANRSFVRETKATNSDVRKEVTNVISKESKLDSLEAAAKS
KNCSSPQRGGSPPWAANSQPQPPRESKLESCKDSPRTAPQTPVLQKTSS
SITLQAARVQPEPRAPGLGVLSPSGEERKRPAPPRPATFPTRQPGLGSQ
DVVSKAANRRIPMEGQRDSAFPKFESKPQSQEVKENQTVKFRCEVSGIP
KPEVAWFLEGTPVRRQEGSIEVYEDAGSHYLCLLKARTRDSGTYSCTAS
NAQGQLSCSWTLQVERLAVMEVAPSFSSVLKDCAVIEGQDFVLQCSVRG
TPVPRITWLLNGQPIQYARSTCEAGVAELHIQDALPEDHGTYTCLAENA
LGQVSCSAWVTVHEKKSSRKSEYLLPVAPSKPTAPIFLQGLSDLKVMDG
SQVTMTVQVSGNPPPEVIWLHNGNEIQESEDFHFEQRGTQHSLCIQEVF
PEDTGTYTCEAWNSAGEVRTQAVLTVQEPHDGTQPWFISKPRSVTASLG
QSVLISCAIAGDPFPTVHWLRDGKALCKDTGHFEVLQNEDVFTLVLKKV
QPWHAGQYEILLKNRVGECSCQVSLMLQNSSARALPRGREPASCEDLCG
GGVGADGGGSDRYGSLRPGWPARGQGWLEEEDGEDVRGVLKRRVETRQH
TEEAIRQQEVEQLDFRDLLGKKVSTKTLSEDDLKEIPAEQMDFRANLQR
QVKPKTVSEEERKVHSPQQVDFRSVLAKKGTSKTPVPEKVPPPKPATPD
FRSVLGGKKKLPAENGSSSAETLNAKAVESSKPLSNAQPSGPLKPVGNA
KPAETLKPMGNAKPAETLKPMGNAKPDENLKSASKEELKKDVKNDVNCK
RGHAGTTDNEKRSESQGTAPAFKQKLQDVHVAEGKKLLLQCQVSSDPPA
TIIWTLNGKTLKTTKFIILSQEGSLCSVSIEKALPEDRGLYKCVAKNDA
GQAECSCQVTVDDAPASENTKAPEMKSRRPKSSLPPVLGTESDATVKKK
PAPKTPPKAAMPPQIIQFPEDQKVRAGESVELFGKVTGTQPITCTWMKF
RKQIQESEHMKVENSENGSKLTILAARQEHCGCYTLLVENKLGSRQAQV
NLTVVDKPDPPAGTPCASDIRSSSLTLSWYGSSYDGGSAVQSYSIEIWD
SANKTWKELATCRSTSFNVQDLLPDHEYKFRVRAINVYGTSEPSQESEL
TTVGEKPEEPKDEVEVSDDDEKEPEVDYRTVTINTEQKVSDFYDIEERL
GSGKFGQVFRLVEKKTRKVWAGKFFKAYSAKEKENIRQEISIMNCLHHP
KLVQCVDAFEEKANIVMVLEIVSGGELFERIIDEDFELTERECIKYMRQ
ISEGVEYIHKQGIVHLDLKPENIMCVNKTGTRIKLIDFGLARRLENAGS
LKVLFGTPEFVAPEVINYEPIGYATDMWSIGVICYILVSGLSPFMGDND
NETLANVTSATWDFDDEAFDEISDDAKDFISNLLKKDMKNRLDCTQCLQ
HPWLMKDTKNMEAKKLSKDRMKKYMARRKWQKTGNAVRAIGRLSSMAMI
SGLSGRKSSTGSPTSPLNAEKLESEEDVSQAFLEAVAEEKPHVKPYFSK
TIRDLEVVEGSAARFDCKIEGYPDPEVVWFKDDQSIRESRHFQIDYDED
GNCSLIISDVCGDDDAKYTCKAVNSLGEATCTAELIVETMEEGEGEGEE
EEE

[0181] MSTN: As used herein, the term, “MSTN,” refers to a gene that encodes myostatin a secreted growth factor that negatively regulates muscle mass. In some embodiments, MSTN may be a human (Gene ID: 2660 (e.g., SEQ ID NO: 147)), non-human primate (e.g., Gene ID: 710114 (e.g., SEQ ID NO: 394), Gene ID: 470605 (e.g., SEQ ID NO: 395)), or rodent gene (e.g., Gene ID: 29152 (e.g., SEQ ID NO: 396), Gene ID: 17700 (e.g., SEQ ID NO: 148)). In addition, an exemplary human transcript (e.g., as annotated under GenBank RefSeq Accession Number: NM_005259.3 (SEQ ID NO: 147)) has been characterized. An exemplary myostatin protein, encoded by a human MSTN gene, is annotated under NCBI Reference Sequence: NP_005250.1 and has the following amino acid sequence:

(SEQ ID NO: 146)
MQKLQLCVYIYLFMLIVAGPVDLNENSEQKENVEKEGLCNACTWRQNTK
SSRIEAIKIQILSKLRLETAPNISKDVIRQLLPKAPPLRELIDQYDVQR
DDSSDGSLEDDDYHATTETIITMPTESDFLMQVDGKPKCCFFKFSSKIQ
YNKVVKAQLWIYLRPVETPTTVFVQILRLIKPMKDGTRYTGIRSLKLDM
NPGTGIWQSIDVKTVLQNWLKQPESNLGIEIKALDENGHDLAVTFPGPG
EDGLNPFLEVKVTDTPKRSRRDFGLDCDEHSTESRCCRYPLTVDFEAFG
WDWIIAPKRYKANYCSGECEFVFLQKYPHTHLVHQANPRGSAGPCCTPT
KMSPINMLYFNGKEQIIYGKIPAMVVDRCGCS

[0182] Muscle atrophy: As used herein, the term, “muscle atrophy,” refers to a condition characterized by muscle wasting. In some embodiments, muscle atrophy is a highly regulated catabolic process which occurs during periods of disuse and/or in response to systemic inflammation (e.g., cachexia). In some embodiments, muscle atrophy is associated with diminishing muscle mass, reduction in muscle size, and/or reduction in the number of muscle cells in a subject. Conditions, including chronic illnesses (e.g., congestive heart failure, diabetes, cancer, AIDS, and renal disease), severe burns, critical care myopathy, limb denervation, stroke, limb fracture, anorexia, spinal cord injury or other conditions leading to muscle disuse may result in muscle atrophy. In some embodiments, muscle atrophy is caused by cancer cachexia, cardiac cachexia, fasting, diabetes, renal failure, denervation, or glucocorticoid-induced muscle atrophy.

[0183] Muscle-targeting agent: As used herein, the term, “muscle-targeting agent,” refers to a molecule that specifically binds to an antigen expressed on muscle cells (e.g., cardiac muscle cells). The antigen in or on muscle cells may be a membrane protein, for example an integral membrane protein or a peripheral membrane protein. Typically, a muscle-targeting agent specifically binds to an antigen on muscle cells that facilitates internalization of the muscle-targeting agent (and any associated molecular payload) into the muscle cells. In some embodiments, a muscle-targeting agent specifically binds to an internalizing, cell surface receptor on muscles and is capable of being internalized into muscle cells through receptor mediated internalization. In some embodiments, the muscle-targeting agent is a small molecule, a protein, a peptide, a nucleic acid (e.g., an aptamer), or an antibody. In some embodiments, the muscle-targeting agent is linked to a molecular payload.

[0184] Muscle-targeting antibody: As used herein, the term, “muscle-targeting antibody,” refers to a muscle-targeting agent that is an antibody that specifically binds to an antigen found in or on muscle cells (e.g., cardiac muscle cells). In some embodiments, a muscle-targeting antibody specifically binds to an antigen on muscle cells that facilitates internalization of the muscle-targeting antibody (and any associated molecular payment) into the muscle cells. In some embodiments, the muscle-targeting antibody specifically binds to an internalizing, cell surface receptor present on muscle cells. In some embodiments, the muscle-targeting antibody is an antibody that specifically binds to a transferrin receptor.

[0185] Oligonucleotide: As used herein, the term “oligonucleotide” refers to an oligomeric nucleic acid compound of up to 200 nucleotides in length. Examples of oligonucleotides include, but are not limited to, RNAi oligonucleotides (e.g., siRNAs, shRNAs), microRNAs, gapmers, mixmers, phosphorodiamidate morpholinos, peptide nucleic acids, aptamers, guide nucleic acids (e.g., Cas9 guide RNAs), etc. Oligonucleotides may be single-stranded or double-stranded. In some embodiments, an oligonucleotide may comprise one or more modified nucleosides (e.g., 2′-O-methyl sugar modifications, purine or pyrimidine modifications). In some embodiments, an oligonucleotide may comprise one or more modified internucleoside linkages. In some embodiments, an oligonucleotide may comprise one or more phosphorothioate linkages, which may be in the Rp or Sp stereochemical conformation.

[0186] PPP1R3A: As used herein, the term, “PPP1R3A,” refers to a gene that encodes the regulatory subunit of protein phosphatase-1 (PP1). In some embodiments, this regulatory subunit binds to muscle glycogen with high affinity and enhances dephosphorylation of glycogen-bound substrates for PP1 such as glycogen synthase and glycogen phosphorylase kinase. In some embodiments, PPP1R3A may be a human (Gene ID: 5506 (SEQ ID NO: 1064)), non-human primate (e.g., Gene ID: 703562 (e.g., SEQ ID NO: 1065) (Macaca mulatta)), or rodent gene (e.g., Gene ID: 140491 (e.g., SEQ ID NO: 963) (M. musculus), Gene ID: 500036 (e.g., SEQ ID NO: 1066) (R. norvegicus). In addition, an exemplary human transcript (e.g., as annotated under GenBank RefSeq Accession Number: NM_002711.4 (SEQ ID NO: 962)) has been characterized.

[0187] An exemplary PPP1R3A protein, encoded by a human PPP1R3A gene, is annotated under NCBI Reference Sequence: NP_002702.2, and has the following amino acid sequence:

(SEQ ID NO: 663)
MEPSEVPSQISKDNFLEVPNLSDSLCEDEEVTFQPGFSPQPSRRGSDSS
EDIYLDTPSSGTRRVSFADSFGFNLVSVKEFDCWELPSASTTFDLGTDI
FHTEEYVLAPLFDLPSSKEDLMQQLQIQKAILESTESLLGSTSIKGIIR
VLNVSFEKLVYVRMSLDDWQTHYDILAEYVPNSCDGETDQFSFKIVLVP
PYQKDGSKVEFCIRYETSVGTFWSNNNGTNYTFICQKKEQEPEPVKPWK
EVPNRQIKGCLKVKSSKEESSVTSEENNFENPKNTDTYIPTIICSHEDK
EDLEASNRNVKDVNREHDEHNEKELELMINQHLIRTRSTASRDERNTFS
TDPVNFPNKAEGLEKKQIHGEICTDLFQRSLSPSSSAESSVKGDFYCNE
KYSSGDDCTHQPSEETTSNMGEIKPSLGDTSSDELVQLHTGSKEVLDDN
ANPAHGNGTVQIPCPSSDQLMAGNLNKKHEGGAKNIEVKDLGCLRRDFH
SDTSACLKESTEEGSSKEDYYGNGKDDEEQRIYLGVNEKQRKNFQTILH
DQERKMGNPKISVAGIGASNRDLATLLSEHTAIPTRAITADVSHSPRTN
LSWEEAVLTPEHHHLTSEGSALGGITGQVCSSRTGNVLRNDYLFQVEEK
SGGINSEDQDNSPQHKQSWNVLESQGKSRENKTNITEHIKGQTDCEDVW
GKRDNTRSLKATTEELFTCQETVCCELSSLADHGITEKAEAGTAYIIKT
TSESTPESMSAREKAIIAKLPQETARSDRPIEVKETAFDPHEGRNDDSH
YTLCQRDTVGVIYDNDFEKESRLGICNVRVDEMEKEETMSMYNPRKTHD
REKCGTGNITSVEESSWVITEYQKATSKLDLQLGMLPTDKTVFSENRDL
RQVQELSKKTDSDAIVHSAFNSDTNRAPQNSSPFSKHHTEISVSTNEQA
IAVENAVTTMASQPISTKSENICNSTREIQGIEKHPYPESKPEEVSRSS
GIVTSGSRKERCIGQIFQTEEYSVEKSLGPMILINKPLENMEEARHENE
GLVSSGQSLYTSGEKESDSSASTSLPVEESQAQGNESLFSKYTNSKIPY
FLLFLIFLITVYHYDLMIGLTFYVLSLSWLSWEEGRQKESVKKK

[0188] Recombinant antibody: The term “recombinant human antibody”, as used herein, is intended to include all human antibodies that are prepared, expressed, created or isolated by recombinant means, such as antibodies expressed using a recombinant expression vector transfected into a host cell (described in more details in this disclosure), antibodies isolated from a recombinant, combinatorial human antibody library (Hoogenboom H. R., (1997) TIB Tech. 15:62-70; Azzazy H., and Highsmith W. E., (2002) Clin. Biochem. 35:425-445; Gavilondo J. V., and Larrick J. W. (2002) BioTechniques 29:128-145; Hoogenboom H., and Chames P. (2000) Immunology Today 21:371-378), antibodies isolated from an animal (e.g., a mouse) that is transgenic for human immunoglobulin genes (see e.g., Taylor, L. D., et al. (1992) Nucl. Acids Res. 20:6287-6295; Kellermann S-A., and Green L. L. (2002) Current Opinion in Biotechnology 13:593-597; Little M. et al (2000) Immunology Today 21:364-370) or antibodies prepared, expressed, created or isolated by any other means that involves splicing of human immunoglobulin gene sequences to other DNA sequences. Such recombinant human antibodies have variable and constant regions derived from human germline immunoglobulin sequences. In certain embodiments, however, such recombinant human antibodies are subjected to in vitro mutagenesis (or, when an animal transgenic for human Ig sequences is used, in vivo somatic mutagenesis) and thus the amino acid sequences of the VH and VL regions of the recombinant antibodies are sequences that, while derived from and related to human germline VH and VL sequences, may not naturally exist within the human antibody germline repertoire in vivo. One embodiment of the disclosure provides fully human antibodies capable of binding human transferrin receptor which can be generated using techniques well known in the art, such as, but not limited to, using human Ig phage libraries such as those disclosed in Jermutus et al., PCT publication No. WO 2005/007699 A2.

[0189] Region of complementarity: As used herein, the term “region of complementarity” refers to a nucleotide sequence, e.g., of an oligonucleotide, that is sufficiently complementary to a cognate nucleotide sequence, e.g., of a target nucleic acid, such that the two nucleotide sequences are capable of annealing to one another under physiological conditions (e.g., in a cell). In some embodiments, a region of complementarity is fully complementary to a cognate nucleotide sequence of target nucleic acid. However, in some embodiments, a region of complementarity is partially complementary to a cognate nucleotide sequence of target nucleic acid (e.g., at least 80%, 90%, 95% or 99% complementarity). In some embodiments, a region of complementarity contains 1, 2, 3, or 4 mismatches compared with a cognate nucleotide sequence of a target nucleic acid.

[0190] Specifically binds: As used herein, the term “specifically binds” refers to the ability of a molecule to bind to a binding partner with a degree of affinity or avidity that enables the molecule to be used to distinguish the binding partner from an appropriate control in a binding assay or other binding context. With respect to an antibody, the term, “specifically binds”, refers to the ability of the antibody to bind to a specific antigen with a degree of affinity or avidity, compared with an appropriate reference antigen or antigens, that enables the antibody to be used to distinguish the specific antigen from others, e.g., to an extent that permits preferential targeting to certain cells, e.g., muscle cells, through binding to the antigen, as described herein. In some embodiments, an antibody specifically binds to a target if the antibody has a K_{D} for binding the target of at least about 10⁻⁴ M, 10⁻⁵ M, 10⁻⁶ M, 10⁻⁷ M, 10⁻⁸ M, 10⁻⁹ M, 10⁻¹⁰ M, 10⁻¹¹ M, 10⁻¹² M, 10⁻¹³ M, or less. In some embodiments, an antibody specifically binds to the transferrin receptor, e.g., an epitope of the apical domain of transferrin receptor.

[0191] Subject: As used herein, the term “subject” refers to a mammal. In some embodiments, a subject is non-human primate, or rodent. In some embodiments, a subject is a human. In some embodiments, a subject is a patient, e.g., a human patient that has or is suspected of having a disease. In some embodiments, the subject is a patient having type 2 diabetes. In some embodiments, the subject is a patient having cancer. In some embodiments, the subject is a human patient who has or is suspected of having heart failure, muscle atrophy (e.g., skeletal and/or cardiac muscle atrophy), muscular dystrophies, cachexia (e.g., cardiac cachexia), muscle hypertrophy, cardiac muscle wasting, and/or cardiomyopathy. In some embodiments, a subject having muscle hypertrophy has at least one mutation in MSTN as in Schuelke, M. et al., “Myostatin Mutation Associated with Gross Muscle Hypertrophy in a Child” N Engl J Med 2004; 350:2682-2688, incorporated herein by reference. In some embodiments, the subject is a patient having type 2 diabetes who is suffering from myocardial complications (e.g., heart failure, cardiac muscle atrophy, cachexia, and/or cardiac muscle hypertrophy). In some embodiments, the subject is a cancer patient suffering from cachexia. In some embodiments, the subject is a human patient who has or is suspected of having cardiac fibrosis or cardiac hypertrophy. In some embodiments, the subject is a human patient who has or is suspected of having angiotensin-II-induced cardiac hypertrophy. In some embodiments, the subject has experienced a myocardial infarction (i.e., heart attack). In some embodiments, the subject is a human patient who has or is suspected of having irritable bowel syndrome (IBS). In some embodiments, the subject is a human patient who has or is suspected of having inflammatory bowel disease (IBD). In some embodiments, the subject is a human patient who has familial thoracic aortic aneurysms and dissections (FTAAD). In some embodiments, the subject is a human patient who has Berdon syndrome (also called “recessive megacystis microcolon intestinal hypoperistalsis syndrome”). In some embodiments, the subject has or is suspected of having cardiac hypertrophy. In some embodiments, the subject has or is suspected of having angiotensin II-induced cardiac hypertrophy. In some embodiments, the subject has muscle atrophy (e.g., cardiac muscle atrophy). In some embodiments, the subject is a human patient who has or is suspected of having typical FOP or atypical FOP. In some embodiments, the subject has at least one ACVR1 allele that comprises one or more deletions or substitutions that lead to alterations in the ACVR1 protein, e.g., L196P, R202I, R206H, Q207E, G328R, G328W, G328E, G356D, R375P, ΔP197-F198.

[0192] TRIM63: As used herein, the term, “TRIM63,” refers to a gene that encodes an E3 ubiquitin ligase that is a member of the RING zinc finger protein family. TRIM63 may also be referred to as IRF; SMRZ; MURF1; MURF2; RNF28; or tripartite motif containing 63. In some embodiments, TRIM63 may be a human (Gene ID: 84676 (e.g., SEQ ID NO: 579)), non-human primate (e.g., Gene ID: 102120812 (e.g., SEQ ID NO: 659)), or rodent gene (e.g., Gene ID: 433766 (e.g., SEQ ID NO: 580), Gene ID: 140939 (e.g., SEQ ID NO: 660)). In addition, an exemplary human transcript (e.g., as annotated under GenBank RefSeq Accession Number: NM_032588.3 (SEQ ID NO: 579)) has been characterized.

[0193] An exemplary TRIM63 protein, encoded by a human TRIM63 gene, is annotated under NCBI Reference Sequence: NP_115977.2, and has the following amino acid sequence:

(SEQ ID NO: 504)
MDYKSSLIQDGNPMENLEKQLICPICLEMFTKPVVILPCQHNLCRKCAN
DIFQAANPYWTSRGSSVSMSGGRFRCPTCRHEVIMDRHGVYGLQRNLLV
ENIIDIYKQECSSRPLQKGSHPMCKEHEDEKINIYCLTCEVPTCSMCKV
FGIHKACEVAPLQSVFQGQKTELNNCISMLVAGNDRVQTIITQLEDSRR
VTKENSHQVKEELSQKFDTLYAILDEKKSELLQRITQEQEKKLSFIEAL
IQQYQEQLDKSTKLVETAIQSLDEPGGATFLLTAKQLIKSIVEASKGCQ
LGKTEQGFENMDFFTLDLEHIADALRAIDFGTDEEEEEFIEEEDQEEEE
STEGKEEGHQ.

[0194] Transferrin receptor: As used herein, the term, “transferrin receptor (also known as CD71, p90, TFR. or TFR1)” refers to an internalizing cell surface receptor that binds transferrin to facilitate iron uptake by endocytosis. In some embodiments, a transferrin receptor may be of human (NCBI Gene ID 7037 (e.g., SEQ ID NO: 397)), non-human primate (e.g., NCBI Gene ID 711568 (e.g., SEQ ID NO: 398) or NCBI Gene ID 102136007 (e.g., SEQ ID NO: 399)), or rodent (e.g., NCBI Gene ID 22042 (e.g., SEQ ID NO: 400)) origin. In addition, multiple human transcript variants have been characterized that encoded different isoforms of the receptor (e.g., as annotated under GenBank RefSeq Accession Numbers: NP_001121620.1 (SEQ ID NO: 401), NP_003225.2 (SEQ ID NO: 105), NP_001300894.1 (SEQ ID NO: 402), and NP_001300895.1 (SEQ ID NO: 403)).

[0195] 2′-modified nucleoside: As used herein, the terms “2′-modified nucleoside” and “2′-modified ribonucleoside” are used interchangeably and refer to a nucleoside having a sugar moiety modified at the 2′ position. In some embodiments, the 2′-modified nucleoside is a 2′-4′ bicyclic nucleoside, where the 2′ and 4′ positions of the sugar are bridged (e.g., via a methylene, an ethylene, or a (S)-constrained ethyl bridge). In some embodiments, the 2′-modified nucleoside is a non-bicyclic 2′-modified nucleoside, e.g., where the 2′ position of the sugar moiety is substituted. Non-limiting examples of 2′-modified nucleosides include: 2′-deoxy, 2′-fluoro (2′-F), 2′-O-methyl (2′-O-Me), 2′-O-methoxyethyl (2′-MOE), 2′-O-aminopropyl (2′-O-AP), 2′-O-dimethylaminoethyl (2′-O-DMAOE), 2′-O-dimethylaminopropyl (2′-O-DMAP), 2′-O-dimethylaminoethyloxyethyl (2′-O-DMAEOE), 2′-O—N-methylacetamido (2′-O-NMA), locked nucleic acid (LNA, methylene-bridged nucleic acid), ethylene-bridged nucleic acid (ENA), and (S)-constrained ethyl-bridged nucleic acid (cEt). In some embodiments, the 2′-modified nucleosides described herein are high-affinity modified nucleosides and oligonucleotides comprising the 2′-modified nucleosides have increased affinity to a target sequence, relative to an unmodified oligonucleotide. Examples of structures of 2′-modified nucleosides are provided below:

[chemical structure]

[chemical structure]

[0196] These examples are shown with phosphate groups, but any internucleoside linkages are contemplated between 2′-modified nucleosides.

### II. Complexes

[0197] Provided herein are complexes that comprise a targeting agent, e.g., an antibody, covalently linked to a molecular payload. In some embodiments, a complex comprises a muscle-targeting antibody covalently linked to an oligonucleotide. A complex may comprise an antibody that specifically binds a single antigenic site or that binds to at least two antigenic sites that may exist on the same or different antigens.

[0198] A complex may be used to modulate the activity or function of at least one gene, protein, and/or nucleic acid. In some embodiments, the molecular payload present with a complex is responsible for the modulation of a gene, protein, and/or nucleic acids. A molecular payload may be a small molecule, protein, nucleic acid, oligonucleotide, or any molecular entity capable of modulating the activity or function of a gene, protein, and/or nucleic acid in a cell. In some embodiments, a molecular payload is an oligonucleotide that targets a MSTN gene in muscle cells (e.g., cardiac muscle cells). In some embodiments, a molecular payload is an oligonucleotide that targets INHBA or activin A in muscle cells (e.g., cardiac muscle cells). In some embodiments, a molecular payload is an oligonucleotide that targets ACVR1B in muscle cells (e.g., cardiac muscle cells). In some embodiments, a molecular payload is an oligonucleotide that targets a MLCK1 gene in muscle cells (e.g., smooth muscle cells). In some embodiments, a molecular payload is an oligonucleotide that targets ACVR1 in muscle cells (e.g., cardiac muscle cells). In some embodiments, a molecular payload is an oligonucleotide that targets FBXO32 in muscle cells (e.g., cardiac muscle cells). In some embodiments, a molecular payload is an oligonucleotide that targets TRIM63 in muscle cells (e.g., cardiac muscle cells). In some embodiments, a molecular payload is an oligonucleotide that targets MEF2D, KLF15, MED1, MED13, or PPP1R3A in muscle cells (e.g., cardiac muscle cells). In some embodiments, a molecular payload inhibits the function of MEF2D, KLF15, MED1, MED13, or PPP1R3A in muscle cells. In some embodiments, a molecular payload promotes or enhances the function of MEF2D, KLF15, MED1, MED13, or PPP1R3A in muscle cells (e.g., increases expression).

[0199] In some embodiments, a complex comprises a muscle-targeting agent, e.g., an anti-transferrin receptor 1 antibody, covalently linked to a molecular payload, e.g., an antisense oligonucleotide that targets MSTN gene, an antisense oligonucleotide that targets INHBA, or an antisense oligonucleotide that targets ACVR1B. In some embodiments, a complex comprises a muscle-targeting agent, e.g., an anti-transferrin receptor 1 antibody, covalently linked to a molecular payload, e.g., an siRNA oligonucleotide that targets MSTN gene, an antisense oligonucleotide that targets INHBA, or an antisense oligonucleotide that targets ACVR1B. In some embodiments, a complex comprises a muscle-targeting agent, e.g., an anti-transferrin receptor 1 antibody, covalently linked to a molecular payload, e.g., an antisense oligonucleotide or siRNA oligonucleotide that targets MLCK1, ACVR1, FBXO32, TRIM63, MEF2D, KLF15, MED1, MED13, or PPP1R3A.

[0200] Complexes comprising an anti-transferrin receptor 1 antibody covalently linked to a molecular payload, e.g., an antisense oligonucleotide or siRNA oligonucleotide, that targets MLCK1, ACVR1, FBXO32, TRIM63, MEF2D, KLF15, MED1, MED13, or PPP1R3A, and their uses are described in International Application Publication Nos: WO2021142217, filed Jan. 8, 2021, entitled “MUSCLE TARGETING COMPLEXES AND USES THEREOF FOR MODULATION OF MLCK1,” WO2021142227, filed Jan. 8, 2021, entitled “MUSCLE TARGETING COMPLEXES AND USES THEREOF FOR MODULATION OF GENES ASSOCIATED WITH MUSCLE HEALTH,” WO2021142260, filed Jan. 8, 2021, entitled “MUSCLE TARGETING COMPLEXES AND USES THEREOF FOR MODULATION OF ACVR1,” WO2021142269, filed Jan. 8, 2021, entitled “MUSCLE TARGETING COMPLEXES AND USES THEREOF FOR MODULATION OF GENES ASSOCIATED WITH MUSCLE ATROPHY”, and WO2021142331, filed Jan. 8, 2021, entitled “MUSCLE TARGETING COMPLEXES AND USES THEREOF FOR MODULATION OF GENES ASSOCIATED WITH CARDIAC MUSCLE DISEASE,” the contents of each of which are incorporated herein by reference in their entirety.

[0201] A. Muscle-Targeting Agents

[0202] Some aspects of the disclosure provide muscle-targeting agents, e.g., for delivering a molecular payload to a muscle cell (e.g., a cardiac muscle cell). In some embodiments, such muscle-targeting agents are capable of binding to a muscle cell, e.g., via specifically binding to an antigen on the muscle cell, and delivering an associated molecular payload to the muscle cell. In some embodiments, muscle-targeting agents are designed to target cardiac muscle cells or cardiac muscle tissues. In some embodiments, the molecular payload is bound (e.g., covalently bound) to the muscle targeting agent and is internalized into the muscle cell upon binding of the muscle targeting agent to an antigen on the muscle cell, e.g., via endocytosis. It should be appreciated that various types of muscle-targeting agents may be used in accordance with the disclosure, and that any muscle targets (e.g., muscle surface proteins) can be targeted by any type of muscle target agents described herein. For example, the muscle-targeting agent may comprise, or consist of, a small molecule, a nucleic acid (e.g., DNA or RNA), a peptide (e.g., an antibody), a lipid (e.g., a microvesicle), or a sugar moiety (e.g., a polysaccharide). Exemplary muscle-targeting agents are described in further detail herein, however, it should be appreciated that the exemplary muscle-targeting agents provided herein are not meant to be limiting.

[0203] Some aspects of the disclosure provide muscle-targeting agents that specifically bind to an antigen on muscle, such as skeletal muscle, smooth muscle, or cardiac muscle. In some embodiments, any of the muscle-targeting agents provided herein bind to (e.g., specifically bind to) an antigen on a cardiac muscle cell, a skeletal muscle cell, and/or a smooth muscle cell. In some embodiments, any of the muscle-targeting agents provided herein bind to (e.g., specifically bind to) an antigen on a cardiac muscle cell.

[0204] By interacting with muscle-specific cell surface recognition elements (e.g., cell membrane proteins), both tissue localization and selective uptake into muscle cells can be achieved. In some embodiments, molecules that are substrates for muscle uptake transporters are useful for delivering a molecular payload into muscle tissue. Binding to muscle surface recognition elements followed by endocytosis can allow even large molecules such as antibodies to enter muscle cells. As another example molecular payloads conjugated to transferrin or anti-transferrin receptor 1 antibodies can be taken up by muscle cells via binding to transferrin receptor, which may then be endocytosed, e.g., via clathrin-mediated endocytosis.

[0205] The use of muscle-targeting agents may be useful for concentrating a molecular payload (e.g., oligonucleotide) in muscle while reducing toxicity associated with effects in other tissues. In some embodiments, the muscle-targeting agent concentrates a bound molecular payload in muscle cells as compared to another cell type within a subject. In some embodiments, the muscle-targeting agent concentrates a bound molecular payload in muscle cells (e.g., cardiac muscle cells) in an amount that is at least 1, 2, 3, 4, 5, 6, 7, 8, 9, 10, 15, 20, 30, 40, 50, 60, 70, 80, 90, or 100 times greater than an amount in non-muscle cells (e.g., liver, neuronal, blood, or fat cells). In some embodiments, a toxicity of the molecular payload in a subject is reduced by at least 1%, 2%, 3%, 4%, 5%, 10%, 15%, 20%, 25%, 30%, 35%, 40%, 45%, 50%, 55%, 60%, 65%, 70%, 75%, 80%, 90%, or 95% when it is delivered to the subject when bound to the muscle-targeting agent.

[0206] In some embodiments, to achieve muscle selectivity, a muscle recognition element (e.g., a muscle cell antigen) may be required. As one example, a muscle-targeting agent may be a small molecule that is a substrate for a muscle-specific uptake transporter. As another example, a muscle-targeting agent may be an antibody that enters a muscle cell via transporter-mediated endocytosis. As another example, a muscle targeting agent may be a ligand that binds to cell surface receptor on a muscle cell. It should be appreciated that while transporter-based approaches provide a direct path for cellular entry, receptor-based targeting may involve stimulated endocytosis to reach the desired site of action.

[0207] i. Muscle-Targeting Antibodies

[0208] In some embodiments, the muscle-targeting agent is an antibody. Generally, the high specificity of antibodies for their target antigen provides the potential for selectively targeting muscle cells (e.g., skeletal, smooth, and/or (e.g., and) cardiac muscle cells). This specificity may also limit off-target toxicity. Examples of antibodies that are capable of targeting a surface antigen of muscle cells have been reported and are within the scope of the disclosure. For example, antibodies that target the surface of muscle cells are described in Arahata K., et al. “Immunostaining of skeletal and cardiac muscle surface membrane with antibody against Duchenne muscular dystrophy peptide” Nature 1988; 333: 861-3; Song K. S., et al. “Expression of caveolin-3 in skeletal, cardiac, and smooth muscle cells. Caveolin-3 is a component of the sarcolemma and co-fractionates with dystrophin and dystrophin-associated glycoproteins” J Biol Chem 1996; 271: 15160-5; and Weisbart R. H. et al., “Cell type specific targeted intracellular delivery into muscle of a monoclonal antibody that binds myosin IIb” Mol Immunol. 2003 March, 39(13):78309; the entire contents of each of which are incorporated herein by reference.

[0209] a. Anti-Transferrin Receptor 1 Antibodies

[0210] Some aspects of the disclosure are based on the recognition that agents binding to transferrin receptor, e.g., anti-transferrin-receptor antibodies, are capable of targeting muscle cell. Transferrin receptors are internalizing cell surface receptors that transport transferrin across the cellular membrane and participate in the regulation and homeostasis of intracellular iron levels. Some aspects of the disclosure provide transferrin receptor binding proteins, which are capable of binding to transferrin receptor. Accordingly, aspects of the disclosure provide binding proteins (e.g., antibodies) that bind to transferrin receptor. In some embodiments, binding proteins that bind to transferrin receptor are internalized, along with any bound molecular payload, into a muscle cell. As used herein, an antibody that binds to a transferrin receptor may be referred to interchangeably as an, transferrin receptor antibody, an anti-transferrin receptor 1 antibody, or an anti-TfR1 antibody. Antibodies that bind, e.g., specifically bind, to a transferrin receptor may be internalized into the cell, e.g., through receptor-mediated endocytosis, upon binding to a transferrin receptor.

[0211] It should be appreciated that anti-transferrin receptor 1 antibodies may be produced, synthesized, and/or (e.g., and) derivatized using several known methodologies, e.g., library design using phage display. Exemplary methodologies have been characterized in the art and are incorporated by reference (Diez, P. et al. “High-throughput phage-display screening in array format”, Enzyme and microbial technology, 2015, 79, 34-41.; Christoph M. H. and Stanley, J. R. “Antibody Phage Display: Technique and Applications” J Invest Dermatol. 2014, 134:2.; Engleman, Edgar (Ed.) “Human Hybridomas and Monoclonal Antibodies.” 1985, Springer.). In other embodiments, an anti-transferrin receptor 1 antibody has been previously characterized or disclosed. Antibodies that specifically bind to transferrin receptor are known in the art (see, e.g., U.S. Pat. No. 4,364,934, filed Dec. 4, 1979, “Monoclonal antibody to a human early thymocyte antigen and methods for preparing same”; U.S. Pat. No. 8,409,573, filed Jun. 14, 2006, “Anti-CD71 monoclonal antibodies and uses thereof for treating malignant tumor cells”; U.S. Pat. No. 9,708,406, filed May 20, 2014, “Anti-transferrin receptor antibodies and methods of use”; U.S. Pat. No. 9,611,323, filed Dec. 19, 2014, “Low affinity blood brain barrier receptor antibodies and uses therefor”; WO 2015/098989, filed Dec. 24, 2014, “Novel anti-Transferrin receptor antibody that passes through blood-brain barrier”; Schneider C. et al. “Structural features of the cell surface receptor for transferrin that is recognized by the monoclonal antibody OKT9.” J Biol Chem. 1982, 257:14, 8516-8522.; Lee et al. “Targeting Rat Anti-Mouse Transferrin Receptor Monoclonal Antibodies through Blood-Brain Barrier in Mouse” 2000, J Pharmacol. Exp. Ther., 292: 1048-1052.).

[0212] Provided herein, in some aspects, are new anti-TfR1 antibodies for use as the muscle targeting agents (e.g., in muscle targeting complexes). In some embodiments, the anti-TfR1 antibody described herein binds to transferrin receptor with high specificity and affinity. In some embodiments, the anti-TfR1 antibody described herein specifically binds to any extracellular epitope of a transferrin receptor or an epitope that becomes exposed to an antibody. In some embodiments, anti-TfR1 antibodies provided herein bind specifically to transferrin receptor from human, non-human primates, mouse, rat, etc. In some embodiments, anti-TfR1 antibodies provided herein bind to human transferrin receptor. In some embodiments, the anti-TfR1 antibody described herein binds to an amino acid segment of a human or non-human primate transferrin receptor, as provided in SEQ ID NOs: 105-108. In some embodiments, the anti-TfR1 antibody described herein binds to an amino acid segment corresponding to amino acids 90-96 of a human transferrin receptor as set forth in SEQ ID NO: 105, which is not in the apical domain of the transferrin receptor.

[0213] In some embodiments, the anti-TfR1 antibody described herein (e.g., 3M12 in Table 1 below and its humanized variants) bind an epitope in TfR1, wherein the epitope comprises residues in amino acids 258-291 and/or amino acids 358-381 of SEQ ID NO: 105. In some embodiments, the anti-TfR1 antibodies (e.g., 3M12 in Table 1 below and its humanized variants) described herein bind an epitope comprising residues in amino acids amino acids 258-291 and amino acids 358-381 of SEQ ID NO: 105. In some embodiments, the anti-TfR1 antibodies described herein (e.g., 3M12 in Table 1 below and its humanized variants) bind an epitope comprising one or more of residues K261, S273, Y282, T362, S368, S370, and K371 of human TfR1 as set forth in SEQ ID NO: 105. In some embodiments, the anti-TfR1 antibodies described herein (e.g., 3M12 in Table 1 below and its humanized variants) bind an epitope comprising residues K261, S273, Y282, T362, S368, S370, and K371 of human TfR1 as set forth in SEQ ID NO: 105.

[0214] An example human transferrin receptor amino acid sequence, corresponding to NCBI sequence NP_003225.2 (transferrin receptor protein 1 isoform 1, Homo sapiens) is as follows:

(SEQ ID NO: 105)
MMDQARSAFSNLFGGEPLSYTRFSLARQVDGDNSHVEMKLAVDEEENAD
NNTKANVTKPKRCSGSICYGTIAVIVFFLIGFMIGYLGYCKGVEPKTEC
ERLAGTESPVREEPGEDFPAARRLYWDDLKRKLSEKLDSTDFTGTIKLL
NENSYVPREAGSQKDENLALYVENQFREFKLSKVWRDQHFVKIQVKDSA
QNSVIIVDKNGRLVYLVENPGGYVAYSKAATVTGKLVHANFGTKKDFED
LYTPVNGSIVIVRAGKITFAEKVANAESLNAIGVLIYMDQTKFPIVNAE
LSFFGHAHLGTGDPYTPGFPSFNHTQFPPSRSSGLPNIPVQTISRAAAE
KLFGNMEGDCPSDWKTDSTCRMVTSESKNVKLTVSNVLKEIKILNIFGV
IKGFVEPDHYVVVGAQRDAWGPGAAKSGVGTALLLKLAQMFSDMVLKDG
FQPSRSIIFASWSAGDFGSVGATEWLEGYLSSLHLKAFTYINLDKAVLG
TSNFKVSASPLLYTLIEKTMQNVKHPVTGQFLYQDSNWASKVEKLTLDN
AAFPFLAYSGIPAVSFCFCEDTDYPYLGTTMDTYKELIERIPELNKVAR
AAAEVAGQFVIKLTHDVELNLDYERYNSQLLSFVRDLNQYRADIKEMGL
SLQWLYSARGDFFRATSRLTTDFGNAEKTDRFVMKKLNDRVMRVEYHFL
SPYVSPKESPFRHVFWGSGSHTLPALLENLKLRKQNNGAFNETLFRNQL
ALATWTIQGAANALSGDVWDIDNEF.

[0215] An example non-human primate transferrin receptor amino acid sequence, corresponding to NCBI sequence NP_001244232.1 (transferrin receptor protein 1, Macaca mulatta) is as follows:

(SEQ ID NO: 106)
MMDQARSAFSNLFGGEPLSYTRFSLARQVDGDNSHVEMKLGVDEEENTD
NNTKPNGTKPKRCGGNICYGTIAVIIFFLIGFMIGYLGYCKGVEPKTEC
ERLAGTESPAREEPEEDFPAAPRLYWDDLKRKLSEKLDTTDFTSTIKLL
NENLYVPREAGSQKDENLALYIENQFREFKLSKVWRDQHFVKIQVKDSA
QNSVIIVDKNGGLVYLVENPGGYVAYSKAATVTGKLVHANFGTKKDFED
LDSPVNGSIVIVRAGKITFAEKVANAESLNAIGVLIYMDQTKFPIVKAD
LSFFGHAHLGTGDPYTPGFPSFNHTQFPPSQSSGLPNIPVQTISRAAAE
KLFGNMEGDCPSDWKTDSTCKMVTSENKSVKLTVSNVLKETKILNIFGV
IKGFVEPDHYVVVGAQRDAWGPGAAKSSVGTALLLKLAQMFSDMVLKDG
FQPSRSIIFASWSAGDFGSVGATEWLEGYLSSLHLKAFTYINLDKAVLG
TSNFKVSASPLLYTLIEKTMQDVKHPVTGRSLYQDSNWASKVEKLTLDN
AAFPFLAYSGIPAVSFCFCEDTDYPYLGTTMDTYKELVERIPELNKVAR
AAAEVAGQFVIKLTHDTELNLDYERYNSQLLLFLRDLNQYRADVKEMGL
SLQWLYSARGDFFRATSRLTTDFRNAEKRDKFVMKKLNDRVMRVEYYFL
SPYVSPKESPFRHVFWGSGSHTLSALLESLKLRRQNNSAFNETLFRNQL
ALATWTIQGAANALSGDVWDIDNEF

[0216] An example non-human primate transferrin receptor amino acid sequence, corresponding to NCBI sequence XP_005545315.1 (transferrin receptor protein 1, Macaca fascicularis) is as follows:

(SEQ ID NO: 107)
MMDQARSAFSNLFGGEPLSYTRFSLARQVDGDNSHVEMKLGVDEEENTD
NNTKANGTKPKRCGGNICYGTIAVIIFFLIGFMIGYLGYCKGVEPKTEC
ERLAGTESPAREEPEEDFPAAPRLYWDDLKRKLSEKLDTTDFTSTIKLL
NENLYVPREAGSQKDENLALYIENQFREFKLSKVWRDQHFVKIQVKDSA
QNSVIIVDKNGGLVYLVENPGGYVAYSKAATVTGKLVHANFGTKKDFED
LDSPVNGSIVIVRAGKITFAEKVANAESLNAIGVLIYMDQTKFPIVKAD
LSFFGHAHLGTGDPYTPGFPSFNHTQFPPSQSSGLPNIPVQTISRAAAE
KLFGNMEGDCPSDWKTDSTCKMVTSENKSVKLTVSNVLKETKILNIFGV
IKGFVEPDHYVVVGAQRDAWGPGAAKSSVGTALLLKLAQMFSDMVLKDG
FQPSRSIIFASWSAGDFGSVGATEWLEGYLSSLHLKAFTYINLDKAVLG
TSNFKVSASPLLYTLIEKTMQDVKHPVTGRSLYQDSNWASKVEKLTLDN
AAFPFLAYSGIPAVSFCFCEDTDYPYLGTTMDTYKELVERIPELNKVAR
AAAEVAGQFVIKLTHDTELNLDYERYNSQLLLFLRDLNQYRADVKEMGL
SLQWLYSARGDFFRATSRLTTDFRNAEKRDKFVMKKLNDRVMRVEYYFL
SPYVSPKESPFRHVFWGSGSHTLSALLESLKLRRQNNSAFNETLFRNQL
ALATWTIQGAANALSGDVWDIDNEF.

[0217] An example mouse transferrin receptor amino acid sequence, corresponding to NCBI sequence NP_001344227.1 (transferrin receptor protein 1, Mus musculus) is as follows:

(SEQ ID NO: 108)
MMDQARSAFSNLFGGEPLSYTRFSLARQVDGDNSHVEMKLAADEEENAD
NNMKASVRKPKRFNGRLCFAAIALVIFFLIGFMSGYLGYCKRVEQKEEC
VKLAETEETDKSETMETEDVPTSSRLYWADLKTLLSEKLNSIEFADTIK
QLSQNTYTPREAGSQKDESLAYYIENQFHEFKFSKVWRDEHYVKIQVKS
SIGQNMVTIVQSNGNLDPVESPEGYVAFSKPTEVSGKLVHANFGTKKDF
EELSYSVNGSLVIVRAGEITFAEKVANAQSFNAIGVLIYMDKNKFPVVE
ADLALFGHAHLGTGDPYTPGFPSFNHTQFPPSQSSGLPNIPVQTISRAA
AEKLFGKMEGSCPARWNIDSSCKLELSQNQNVKLIVKNVLKERRILNIF
GVIKGYEEPDRYVVVGAQRDALGAGVAAKSSVGTGLLLKLAQVFSDMIS
KDGFRPSRSIIFASWTAGDFGAVGATEWLEGYLSSLHLKAFTYINLDKV
VLGTSNFKVSASPLLYTLMGKIMQDVKHPVDGKSLYRDSNWISKVEKLS
FDNAAYPFLAYSGIPAVSFCFCEDADYPYLGTRLDTYEALTQKVPQLNQ
MVRTAAEVAGQLIIKLTHDVELNLDYEMYNSKLLSFMKDLNQFKTDIRD
MGLSLQWLYSARGDYFRATSRLTTDFHNAEKTNRFVMREINDRIMKVEY
HFLSPYVSPRESPFRHIFWGSGSHTLSALVENLKLRQKNITAFNETLFR
NQLALATWTIQGVANALSGDIWNIDNEF

[0218] In some embodiments, an anti-transferrin receptor 1 antibody binds to an amino acid segment of the receptor as follows: FVKIQVKDSAQNSVIIVDKNGRLVYLVENPGGYVAYSKAATVTGKLVHANFGTKKDFE DLYTPVNGSIVIVRAGKITFAEKVANAESLNAIGVLIYMDQTKFPIVNAELSFFGHAHLG TGDPYTPGFPSFNHTQFPPSRSSGLPNIPVQTISRAAAEKLFGNMEGDCPSDWKTDSTCR MVTSESKNVKLTVSNVLKE (SEQ ID NO: 109) and does not inhibit the binding interactions between transferrin receptors and transferrin and/or (e.g., and) human hemochromatosis protein (also known as HFE). In some embodiments, the anti-transferrin receptor 1 antibody described herein does not bind an epitope in SEQ ID NO: 109.

[0219] Appropriate methodologies may be used to obtain and/or (e.g., and) produce antibodies, antibody fragments, or antigen-binding agents, e.g., through the use of recombinant DNA protocols. In some embodiments, an antibody may also be produced through the generation of hybridomas (see, e.g., Kohler, G and Milstein, C. “Continuous cultures of fused cells secreting antibody of predefined specificity” Nature, 1975, 256: 495-497). The antigen-of-interest may be used as the immunogen in any form or entity, e.g., recombinant or a naturally occurring form or entity. Hybridomas are screened using standard methods, e.g., ELISA screening, to find at least one hybridoma that produces an antibody that targets a particular antigen. Antibodies may also be produced through screening of protein expression libraries that express antibodies, e.g., phage display libraries. Phage display library design may also be used, in some embodiments, (see, e.g. U.S. Pat. No. 5,223,409, filed Mar. 1, 1991, “Directed evolution of novel binding proteins”; WO 1992/18619, filed Apr. 10, 1992, “Heterodimeric receptor libraries using phagemids”; WO 1991/17271, filed May 1, 1991, “Recombinant library screening methods”; WO 1992/20791, filed May 15, 1992, “Methods for producing members of specific binding pairs”; WO 1992/15679, filed Feb. 28, 1992, and “Improved epitope displaying phage”). In some embodiments, an antigen-of-interest may be used to immunize a non-human animal, e.g., a rodent or a goat. In some embodiments, an antibody is then obtained from the non-human animal, and may be optionally modified using a number of methodologies, e.g., using recombinant DNA techniques. Additional examples of antibody production and methodologies are known in the art (see, e.g., Harlow et al. “Antibodies: A Laboratory Manual”, Cold Spring Harbor Laboratory, 1988.).

[0220] In some embodiments, an antibody is modified, e.g., modified via glycosylation, phosphorylation, sumoylation, and/or (e.g., and) methylation. In some embodiments, an antibody is a glycosylated antibody, which is conjugated to one or more sugar or carbohydrate molecules. In some embodiments, the one or more sugar or carbohydrate molecule are conjugated to the antibody via N-glycosylation, O-glycosylation, C-glycosylation, glypiation (GPI anchor attachment), and/or (e.g., and) phosphoglycosylation. In some embodiments, the one or more sugar or carbohydrate molecules are monosaccharides, disaccharides, oligosaccharides, or glycans. In some embodiments, the one or more sugar or carbohydrate molecule is a branched oligosaccharide or a branched glycan. In some embodiments, the one or more sugar or carbohydrate molecule includes a mannose unit, a glucose unit, an N-acetylglucosamine unit, an N-acetylgalactosamine unit, a galactose unit, a fucose unit, or a phospholipid unit. In some embodiments, there are about 1-10, about 1-5, about 5-10, about 1-4, about 1-3, or about 2 sugar molecules. In some embodiments, a glycosylated antibody is fully or partially glycosylated. In some embodiments, an antibody is glycosylated by chemical reactions or by enzymatic means. In some embodiments, an antibody is glycosylated in vitro or inside a cell, which may optionally be deficient in an enzyme in the N- or O-glycosylation pathway, e.g., a glycosyltransferase. In some embodiments, an antibody is functionalized with sugar or carbohydrate molecules as described in International Patent Application Publication WO2014065661, published on May 1, 2014, entitled, “Modified antibody, antibody-conjugate and process for the preparation thereof”.

[0221] In some embodiments, the anti-TfR1 antibody of the present disclosure comprises a VL domain and/or (e.g., and) VH domain of any one of the anti-TfR1 antibodies selected from any one of Tables 2-7, and comprises a constant region comprising the amino acid sequences of the constant regions of an IgG, IgE, IgM, IgD, IgA or IgY immunoglobulin molecule, any class (e.g., IgG1, IgG2, IgG3, IgG4, IgA1 and IgA2), or any subclass (e.g., IgG2a and IgG2b) of immunoglobulin molecule. Non-limiting examples of human constant regions are described in the art, e.g., see Kabat E A et al., (1991) supra.

[0222] In some embodiments, agents binding to transferrin receptor, e.g., anti-TfR1 antibodies, are capable of targeting muscle cell and/or (e.g., and) mediate the transportation of an agent across the blood brain barrier. Transferrin receptors are internalizing cell surface receptors that transport transferrin across the cellular membrane and participate in the regulation and homeostasis of intracellular iron levels. Some aspects of the disclosure provide transferrin receptor binding proteins, which are capable of binding to transferrin receptor. Antibodies that bind, e.g., specifically bind, to a transferrin receptor may be internalized into the cell, e.g., through receptor-mediated endocytosis, upon binding to a transferrin receptor.

[0223] Provided herein, in some aspects, are humanized antibodies that bind to transferrin receptor with high specificity and affinity. In some embodiments, the humanized anti-TfR1 antibody described herein specifically binds to any extracellular epitope of a transferrin receptor or an epitope that becomes exposed to an antibody. In some embodiments, the humanized anti-TfR1 antibodies provided herein bind specifically to transferrin receptor from human, non-human primates, mouse, rat, etc. In some embodiments, the humanized anti-TfR1 antibodies provided herein bind to human transferrin receptor. In some embodiments, the humanized anti-TfR1 antibody described herein binds to an amino acid segment of a human or non-human primate transferrin receptor, as provided in SEQ ID NOs: 105-108. In some embodiments, the humanized anti-TfR1 antibody described herein binds to an amino acid segment corresponding to amino acids 90-96 of a human transferrin receptor as set forth in SEQ ID NO: 105, which is not in the apical domain of the transferrin receptor. In some embodiments, the humanized anti-TfR1 antibodies described herein binds to TfR1 but does not bind to TfR2.

[0224] In some embodiments, an anti-TfR1 antibody specifically binds a TfR1 (e.g., a human or non-human primate TfR1) with binding affinity (e.g., as indicated by Kd) of at least about 10⁻⁴ M, 10⁻⁵ M, 10⁻⁶ M, 10⁻⁷ M, 10⁻⁸ M, 10⁻⁹ M, 10⁻¹⁰ M, 10⁻¹¹ M, 10⁻¹² M, 10⁻¹³ M, or less. In some embodiments, the anti-TfR1 antibodies described herein bind to TfR1 with a KD of sub-nanomolar range. In some embodiments, the anti-TfR1 antibodies described herein selectively bind to transferrin receptor 1 (TfR1) but do not bind to transferrin receptor 2 (TfR2). In some embodiments, the anti-TfR1 antibodies described herein bind to human TfR1 and cyno TfR1 (e.g., with a Kd of 10⁻⁷ M, 10⁻⁸ M, 10⁻⁹ M, 10⁻¹⁰ M, 10⁻¹¹ M, 10⁻¹² M, 10⁻¹³ M, or less), but do not bind to a mouse TfR1. The affinity and binding kinetics of the anti-TfR1 antibody can be tested using any suitable method including but not limited to biosensor technology (e.g., OCTET or BIACORE). In some embodiments, binding of any one of the anti-TfR1 antibodies described herein does not complete with or inhibit transferrin binding to the TfR1. In some embodiments, binding of any one of the anti-TfR1 antibodies described herein does not complete with or inhibit HFE-beta-2-microglobulin binding to the TfR1.

[0225] Amino acid sequences (e.g., CDRs, VH, VL, heavy chain, and/or light chain amino acid sequences) of anti-transferrin receptor 1 antibodies that may be used in complexes described herein are described in International Application Publication Nos: WO2021142217, filed Jan. 8, 2021, entitled “MUSCLE TARGETING COMPLEXES AND USES THEREOF FOR MODULATION OF MLCK1,” WO2021142227, filed Jan. 8, 2021, entitled “MUSCLE TARGETING COMPLEXES AND USES THEREOF FOR MODULATION OF GENES ASSOCIATED WITH MUSCLE HEALTH,” WO2021142260, filed Jan. 8, 2021, entitled “MUSCLE TARGETING COMPLEXES AND USES THEREOF FOR MODULATION OF ACVR1,” WO2021142269, filed Jan. 8, 2021, entitled “MUSCLE TARGETING COMPLEXES AND USES THEREOF FOR MODULATION OF GENES ASSOCIATED WITH MUSCLE ATROPHY”, and WO2021142331, filed Jan. 8, 2021, entitled “MUSCLE TARGETING COMPLEXES AND USES THEREOF FOR MODULATION OF GENES ASSOCIATED WITH CARDIAC MUSCLE DISEASE,” the contents of each of which are incorporated herein by reference in their entirety.

[0226] Non-limiting examples of anti-TfR1 antibodies are provided in Table 2.

TABLE 2
Examples of Anti-TfR1 Antibodies

| | No. | | | |
|---|---|---|---|---|
| Ab | system | IMGT | Kabat | Chothia |
| 3-A4 | CDR- | GFNIKDDY (SEQ ID NO: | DDYMY (SEQ ID NO: 7) | GFNIKDD (SEQ |
| | H1 | 1) | | ID NO: 12) |
| | CDR- | IDPENGDT (SEQ ID NO: | WIDPENGDTEYASKFQD | ENG (SEQ ID NO: |
| | H2 | 2) | (SEQ ID NO: 8) | 13) |
| | CDR- | TLWLRRGLDY (SEQ ID | WLRRGLDY (SEQ ID NO: 9) | LRRGLD (SEQ ID |
| | H3 | NO: 3) | | NO: 14) |
| | CDR- | KSLLHSNGYTY (SEQ ID | RSSKSLLHSNGYTYLF (SEQ | SKSLLHSNGYTY |
| | L1 | NO: 4) | ID NO: 10) | (SEQ ID NO: 15) |
| | CDR- | RMS (SEQ ID NO: 5) | RMSNLAS (SEQ ID NO: 11) | RMS (SEQ ID NO: |
| | L2 | | | 5) |
| | CDR- | MQHLEYPFT (SEQ ID | MQHLEYPFT (SEQ ID NO: 6) | HLEYPF (SEQ ID |
| | L3 | NO: 6) | | NO: 16) |
| | VH | EVQLQQSGAELVRPGASVKLSCTASGFNIKDDYMYWVKQRPEQGLEWIGWI | | |
| | | DPENGDTEYASKFQDKATVTADTSSNTAYLQLSSLTSEDTAVYYCTLWLRRG | | |
| | | LDYWGQGTSVTVSS (SEQ ID NO: 17) | | |
| | VL | DIVMTQAAPSVPVTPGESVSISCRSSKSLLHSNGYTYLFWFLQRPGQSPQLLIY | | |
| | | RMSNLASGVPDRFSGSGSGTAFTLRISRVEAEDVGVYYCMQHLEYPFTFGGG | | |
| | | TKLEIK (SEQ ID NO: 18) | | |
| 3-A4 | CDR- | GFNIKDDY (SEQ ID NO: | DDYMY (SEQ ID NO: 7) | GFNIKDD (SEQ |
| N54T* | H1 | 1) | | ID NO: 12) |
| | CDR- | IDPETGDT (SEQ ID NO: | WIDPETGDTEYASKFQD | ETG (SEQ ID NO: |
| | H2 | 19) | (SEQ ID NO: 20) | 21) |
| | CDR- | TLWLRRGLDY (SEQ ID | WLRRGLDY (SEQ ID NO: 9) | LRRGLD (SEQ ID |
| | H3 | NO: 3) | | NO: 14) |
| | CDR- | KSLLHSNGYTY (SEQ ID | RSSKSLLHSNGYTYLF (SEQ | SKSLLHSNGYTY |
| | L1 | NO: 4) | ID NO: 10) | (SEQ ID NO: 15) |
| | CDR- | RMS (SEQ ID NO: 5) | RMSNLAS (SEQ ID NO: 11) | RMS(SEQ ID NO: |
| | L2 | | | 5) |
| | CDR- | MQHLEYPFT (SEQ ID | MQHLEYPFT (SEQ ID NO: 6) | HLEYPF (SEQ ID |
| | L3 | NO: 6) | | NO: 16) |
| | VH | EVQLQQSGAELVRPGASVKLSCTASGFNIKDDYMYWVKQRPEQGLEWIGWI | | |
| | | DPETGDTEYASKFQDKATVTADTSSNTAYLQLSSLTSEDTAVYYCTLWLRRG | | |
| | | LDYWGQGTSVTVSS (SEQ ID NO: 22) | | |
| | VL | DIVMTQAAPSVPVTPGESVSISCRSSKSLLHSNGYTYLFWFLQRPGQSPQLLIY | | |
| | | RMSNLASGVPDRFSGSGSGTAFTLRISRVEAEDVGVYYCMQHLEYPFTFGGG | | |
| | | TKLEIK (SEQ ID NO: 18) | | |
| 3-A4 | CDR- | GFNIKDDY (SEQ ID NO: | DDYMY (SEQ ID NO: 7) | GFNIKDD (SEQ |
| N54S* | H1 | 1) | | ID NO: 12) |
| | CDR- | IDPESGDT (SEQ ID NO: | WIDPESGDTEYASKFQD | ESG (SEQ ID NO: |
| | H2 | 23) | (SEQ ID NO: 24) | 25) |
| | CDR- | TLWLRRGLDY (SEQ ID | WLRRGLDY (SEQ ID NO: 9) | LRRGLD (SEQ ID |
| | H3 | NO: 3) | | NO: 14) |
| | CDR- | KSLLHSNGYTY (SEQ ID | RSSKSLLHSNGYTYLF (SEQ | SKSLLHSNGYTY |
| | L1 | NO: 4) | ID NO: 10) | (SEQ ID NO: 15) |
| | CDR- | RMS (SEQ ID NO: 5) | RMSNLAS (SEQ ID NO: 11) | RMS (SEQ ID NO: |
| | L2 | | | 5) |
| | CDR- | MQHLEYPFT (SEQ ID | MQHLEYPFT (SEQ ID NO: 6) | HLEYPF (SEQ ID |
| | L3 | NO: 6) | | NO: 16) |
| | VH | EVQLQQSGAELVRPGASVKLSCTASGFNIKDDYMYWVKQRPEQGLEWIGWI | | |
| | | DPESGDTEYASKFQDKATVTADTSSNTAYLQLSSLTSEDTAVYYCTLWLRRG | | |
| | | LDYWGQGTSVTVSS (SEQ ID NO: 26) | | |
| | VL | DIVMTQAAPSVPVTPGESVSISCRSSKSLLHSNGYTYLFWFLQRPGQSPQLLIY | | |
| | | RMSNLASGVPDRFSGSGSGTAFTLRISRVEAEDVGVYYCMQHLEYPFTFGGG | | |
| | | TKLEIK (SEQ ID NO: 18) | | |
| 3-M12 | CDR- | GYSITSGYY (SEQ ID | SGYYWN (SEQ ID NO: 33) | GYSITSGY (SEQ |
| | H1 | NO: 27) | | ID NO: 38) |
| | CDR- | ITFDGAN (SEQ ID NO: | YITFDGANNYNPSLKN (SEQ | FDG (SEQ ID NO: |
| | H2 | 28) | ID NO: 34) | 39) |
| | CDR- | TRSSYDYDVLDY (SEQ | SSYDYDVLDY (SEQ ID NO: | SYDYDVLD (SEQ |
| | H3 | ID NO: 29) | 35) | ID NO: 40) |
| | CDR- | QDISNF (SEQ ID NO: 30) | RASQDISNFLN (SEQ ID NO: | SQDISNF (SEQ ID |
| | L1 | | 36) | NO: 41) |
| | CDR- | YTS (SEQ ID NO: 31) | YTSRLHS (SEQ ID NO: 37) | YTS (SEQ ID NO: |
| | L2 | | | 31) |
| | CDR- | QQGHTLPYT (SEQ ID | QQGHTLPYT (SEQ ID NO: 32) | GHTLPY (SEQ ID |
| | L3 | NO: 32) | | NO: 42) |
| | VH | DVQLQESGPGLVKPSQSLSLTCSVTGYSITSGYYWNWIRQFPGNKLEWMGYIT | | |
| | | FDGANNYNPSLKNRISITRDTSKNQFFLKLTSVTTEDTATYYCTRSSYDYDVL | | |
| | | DYWGQGTTLTVSS (SEQ ID NO: 43) | | |
| | VL | DIQMTQTTSSLSASLGDRVTISCRASQDISNFLNWYQQRPDGTVKLLIYYTSRL | | |
| | | HSGVPSRFSGSGSGTDFSLTVSNLEQEDIATYFCQQGHTLPYTFGGGTKLEIK | | |
| | | (SEQ ID NO: 44) | | |
| 5-H12 | CDR- | GYSFTDYC (SEQ ID NO: | DYCIN (SEQ ID NO: 51) | GYSFTDY (SEQ |
| | H1 | 45) | | ID NO: 56) |
| | CDR- | IYPGSGNT (SEQ ID NO: | WIYPGSGNTRYSERFKG | GSG (SEQ ID NO: |
| | H2 | 46) | (SEQ ID NO: 52) | 57) |
| | CDR- | AREDYYPYHGMDY | EDYYPYHGMDY (SEQ ID | DYYPYHGMD |
| | H3 | (SEQ ID NO: 47) | NO: 53) | (SEQ ID NO: 58) |
| | CDR- | ESVDGYDNSF (SEQ ID | RASESVDGYDNSFMH (SEQ | SESVDGYDNSF |
| | L1 | NO: 48) | ID NO: 54) | (SEQ ID NO: 59) |
| | CDR- | RAS (SEQ ID NO: 49) | RASNLES (SEQ ID NO: 55) | RAS (SEQ ID NO: |
| | L2 | | | 49) |
| | CDR- | QQSSEDPWT (SEQ ID | QQSSEDPWT (SEQ ID NO: 50) | SSEDPW (SEQ ID |
| | L3 | NO: 50) | | NO: 60) |
| | VH | QIQLQQSGPELVRPGASVKISCKASGYSFTDYCINWVNQRPGQGLEWIGWIYP | | |
| | | GSGNTRYSERFKGKATLTVDTSSNTAYMQLSSLTSEDSAVYFCAREDYYPYH | | |
| | | GMDYWGQGTSVTVSS (SEQ ID NO: 61) | | |
| | VL | DIVLTQSPTSLAVSLGQRATISCRASESVDGYDNSFMHWYQQKPGQPPKLLIF | | |
| | | RASNLESGIPARFSGSGSRTDFTLTINPVEAADVATYYCQQSSEDPWTFGGGT | | |
| | | KLEIK (SEQ ID NO: 62) | | |
| 5-H12 | CDR- | GYSFTDYY (SEQ ID | DYYIN (SEQ ID NO: 64) | GYSFTDY (SEQ |
| C33Y* | H1 | NO: 63) | | ID NO: 56) |
| | CDR- | IYPGSGNT (SEQ ID NO: | WIYPGSGNTRYSERFKG | GSG (SEQ ID NO: |
| | H2 | 46) | (SEQ ID NO: 52) | 57) |
| | CDR- | AREDYYPYHGMDY | EDYYPYHGMDY (SEQ ID | DYYPYHGMD |
| | H3 | (SEQ ID NO: 47) | NO: 53) | (SEQ ID NO: 58) |
| | CDR- | ESVDGYDNSF (SEQ ID | RASESVDGYDNSFMH (SEQ | SESVDGYDNSF |
| | L1 | NO: 48) | ID NO: 54) | (SEQ ID NO: 59) |
| | CDR- | RAS (SEQ ID NO: 49) | RASNLES (SEQ ID NO: 55) | RAS (SEQ ID NO: |
| | L2 | | | 49) |
| | CDR- | QQSSEDPWT (SEQ ID | QQSSEDPWT (SEQ ID NO: 50) | SSEDPW (SEQ ID |
| | L3 | NO: 50) | | NO: 60) |
| | VH | QIQLQQSGPELVRPGASVKISCKASGYSFTDYYINWVNQRPGQGLEWIGWIYP | | |
| | | GSGNTRYSERFKGKATLTVDTSSNTAYMQLSSLTSEDSAVYFCAREDYYPYH | | |
| | | GMDYWGQGTSVTVSS (SEQ ID NO: 65) | | |
| | VL | DIVLTQSPTSLAVSLGQRATISCRASESVDGYDNSFMHWYQQKPGQPPKLLIF | | |
| | | RASNLESGIPARFSGSGSRTDFTLTINPVEAADVATYYCQQSSEDPWTFGGGT | | |
| | | KLEIK (SEQ ID NO: 62) | | |
| 5-H12 | CDR- | GYSFTDYD (SEQ ID | DYDIN (SEQ ID NO: 67) | GYSFTDY (SEQ |
| C33D* | H1 | NO: 66) | | ID NO: 56) |
| | CDR- | IYPGSGNT (SEQ ID NO: | WIYPGSGNTRYSERFKG | GSG (SEQ ID NO: |
| | H2 | 46) | (SEQ ID NO: 52) | 57) |
| | CDR- | AREDYYPYHGMDY | EDYYPYHGMDY (SEQ ID | DYYPYHGMD |
| | H3 | (SEQ ID NO: 47) | NO: 53) | (SEQ ID NO: 58) |
| | CDR- | ESVDGYDNSF (SEQ ID | RASESVDGYDNSFMH (SEQ | SESVDGYDNSF |
| | L1 | NO: 48) | ID NO: 54) | (SEQ ID NO: 59) |
| | CDR- | RAS (SEQ ID NO: 49) | RASNLES (SEQ ID NO: 55) | RAS (SEQ ID NO: |
| | L2 | | | 49) |
| | CDR- | QQSSEDPWT (SEQ ID | QQSSEDPWT (SEQ ID NO: 50) | SSEDPW (SEQ ID |
| | L3 | NO: 50) | | NO: 60) |

| | |
|---|---|
| VH | QIQLQQSGPELVRPGASVKISCKASGYSFTDYDINWVNQRPGQGLEWIGWIYPG |
| | SGNTRYSERFKGKATLTVDTSSNTAYMQLSSLTSEDSAVYFCAREDYYPYHGM |
| | DYWGQGTSVTVSS (SEQ ID NO: 68) |
| VL | DIVLTQSPTSLAVSLGQRATISCRASESVDGYDNSFMHWYQQKPGQPPKLLIF |
| | RASNLESGIPARFSGSGSRTDFTLTINPVEAADVATYYCQQSSEDPWTFGGGT |
| | KLEIK (SEQ ID NO: 62) |

*mutation positions are according to Kabat numbering of the respective VH sequences containing the mutations

[0227] In some embodiments, the anti-TfR1 antibody of the present disclosure is a humanized variant of any one of the anti-TfR1 antibodies provided in Table 2. In some embodiments, the anti-TfR1 antibody of the present disclosure comprises a CDR-H1, a CDR-H2, a CDR-H3, a CDR-L1, a CDR-L2, and a CDR-L3 that are the same as the CDR-H1, CDR-H2, and CDR-H3 in any one of the anti-TfR1 antibodies provided in Table 2, and comprises a humanized heavy chain variable region and/or (e.g., and) a humanized light chain variable region.

[0228] Humanized antibodies are human immunoglobulins (recipient antibody) in which residues from a complementarity determining region (CDR) of the recipient are replaced by residues from a CDR of a non-human species (donor antibody) such as mouse, rat, or rabbit having the desired specificity, affinity, and capacity. In some embodiments, Fv framework region (FR) residues of the human immunoglobulin are replaced by corresponding non-human residues. Furthermore, the humanized antibody may comprise residues that are found neither in the recipient antibody nor in the imported CDR or framework sequences, but are included to further refine and optimize antibody performance. In general, the humanized antibody will comprise substantially all of at least one, and typically two, variable domains, in which all or substantially all of the CDR regions correspond to those of a non-human immunoglobulin and all or substantially all of the FR regions are those of a human immunoglobulin consensus sequence. The humanized antibody optimally also will comprise at least a portion of an immunoglobulin constant region or domain (Fc), typically that of a human immunoglobulin. Antibodies may have Fc regions modified as described in WO 99/58572. Other forms of humanized antibodies have one or more CDRs (one, two, three, four, five, six) which are altered with respect to the original antibody, which are also termed one or more CDRs derived from one or more CDRs from the original antibody. Humanized antibodies may also involve affinity maturation.

[0229] Humanized antibodies and methods of making them are known, e.g., as described in Almagro et al., Front. Biosci. 13:1619-1633 (2008); Riechmann et al., Nature 332:323-329 (1988); Queen et al., Proc. Nat'l Acad. Sci. USA 86:10029-10033 (1989); U.S. Pat. Nos. 5,821,337, 7,527,791, 6,982,321, and 7,087,409; Kashmiri et al., Methods 36:25-34 (2005); Padlan et al., Mol. Immunol. 28:489-498 (1991); Dall'Acqua et al., Methods 36:43-60 (2005); Osbourn et al., Methods 36:61-68 (2005); and Klimka et al., Br. J. Cancer, 83:252-260 (2000), the contents of all of which are incorporated herein by reference. Human framework regions that may be used for humanization are described in e.g., Sims et al. J. Immunol. 151:2296 (1993); Carter et al., Proc. Natl. Acad. Sci. USA, 89:4285 (1992); Presta et al., J. Immunol., 151:2623 (1993); Almagro et al., Front. Biosci. 13:1619-1633 (2008)); Baca et al., J. Biol. Chem. 272:10678-10684 (1997); and Rosok et al., J Biol. Chem. 271:22611-22618 (1996), the contents of all of which are incorporated herein by reference.

[0230] In some embodiments, the humanized anti-TfR1 antibody of the present disclosure comprises a humanized VH comprising one or more amino acid variations (e.g., in the VH framework region) as compared with any one of the VHs listed in Table 2, and/or (e.g., and) a humanized VL comprising one or more amino acid variations (e.g., in the VL framework region) as compared with any one of the VLs listed in Table 2.

[0231] In some embodiments, the humanized anti-TfR1 antibody of the present disclosure comprises a humanized VH containing no more than 25 amino acid variations (e.g., no more than 25, 24, 23, 22, 21, 20, 19, 18, 17, 16, 15, 14, 13, 12, 11, 10, 9, 8, 7, 6, 5, 4, 3, 2, or 1 amino acid variation) in the framework regions as compared with the VH of any of the anti-TfR1 antibodies listed in Table 2 (e.g., any one of SEQ ID NOs: 17, 22, 26, 43, 61, 65, and 68). Alternatively or in addition (e.g., in addition), the humanized anti-TfR1 antibody of the present disclosure comprises a humanized VL containing no more than 25 amino acid variations (e.g., no more than 25, 24, 23, 22, 21, 20, 19, 18, 17, 16, 15, 14, 13, 12, 11, 10, 9, 8, 7, 6, 5, 4, 3, 2, or 1 amino acid variation) in the framework regions as compared with the VL of any one of the anti-TfR1 antibodies listed in Table 2 (e.g., any one of SEQ ID NOs: 18, 44, and 62).

[0232] In some embodiments, the humanized anti-TfR1 antibody of the present disclosure comprises a humanized VH comprising an amino acid sequence that is at least 75% (e.g., 75%, 80%, 85%, 90%, 95%, 98%, or 99%) identical in the framework regions to the VH of any of the anti-TfR1 antibodies listed in Table 2 (e.g., any one of SEQ ID NOs: 17, 22, 26, 43, 61, 65, and 68). Alternatively or in addition (e.g., in addition), In some embodiments, the humanized anti-TfR1 antibody of the present disclosure comprises a humanized VL comprising an amino acid sequence that is at least 75% (e.g., 75%, 80%, 85%, 90%, 95%, 98%, or 99%) identical in the framework regions to the VL of any of the anti-TfR1 antibodies listed in Table 2 (e.g., any one of SEQ ID NOs: 18, 44, and 62).

[0233] In some embodiments, the humanized anti-TfR1 antibody of the present disclosure comprises a humanized VH comprising a CDR-H1 having the amino acid sequence of SEQ ID NO: 1 (according to the IMGT definition system), a CDR-H2 having the amino acid sequence of SEQ ID NO: 2, SEQ ID NO: 19, or SEQ ID NO: 23 (according to the IMGT definition system), a CDR-H3 having the amino acid sequence of SEQ ID NO: 3 (according to the IMGT definition system), and containing no more than 25 amino acid variations (e.g., no more than 25, 24, 23, 22, 21, 20, 19, 18, 17, 16, 15, 14, 13, 12, 11, 10, 9, 8, 7, 6, 5, 4, 3, 2, or 1 amino acid variation) in the framework regions as compared with the VH as set forth in SEQ ID NO: 17, SEQ ID NO: 22, or SEQ ID NO: 26. Alternatively or in addition (e.g., in addition), the anti-TfR1 antibody of the present disclosure comprises a humanized VL comprising a CDR-L1 having the amino acid sequence of SEQ ID NO: 4 (according to the IMGT definition system), a CDR-L2 having the amino acid sequence of SEQ ID NO: 5 (according to the IMGT definition system), and a CDR-L3 having the amino acid sequence of SEQ ID NO: 6 (according to the IMGT definition system), and containing no more than 25 amino acid variations (e.g., no more than 25, 24, 23, 22, 21, 20, 19, 18, 17, 16, 15, 14, 13, 12, 11, 10, 9, 8, 7, 6, 5, 4, 3, 2, or 1 amino acid variation) in the framework regions as compared with the VL as set forth in SEQ ID NO: 18.

[0234] In some embodiments, the humanized anti-TfR1 antibody of the present disclosure comprises a humanized VH comprising a CDR-H1 having the amino acid sequence of SEQ ID NO: 1 (according to the IMGT definition system), a CDR-H2 having the amino acid sequence of SEQ ID NO: 2, SEQ ID NO: 19, or SEQ ID NO: 23 (according to the IMGT definition system), a CDR-H3 having the amino acid sequence of SEQ ID NO: 3 (according to the IMGT definition system), and is at least 75% (e.g., 75%, 80%, 85%, 90%, 95%, 98%, or 99%) identical in the framework regions to the VH as set forth in SEQ ID NO: 17, SEQ ID NO: 22, or SEQ ID NO: 26. Alternatively or in addition (e.g., in addition), the humanized anti-TfR1 antibody of the present disclosure comprises a humanized VL comprising a CDR-L1 having the amino acid sequence of SEQ ID NO: 4 (according to the IMGT definition system), a CDR-L2 having the amino acid sequence of SEQ ID NO: 5 (according to the IMGT definition system), and a CDR-L3 having the amino acid sequence of SEQ ID NO: 6 (according to the IMGT definition system), and is at least 75% (e.g., 75%, 80%, 85%, 90%, 95%, 98%, or 99%) identical in the framework regions to the VL as set forth in any one of SEQ ID NO: 18.

[0235] In some embodiments, the humanized anti-TfR1 antibody of the present disclosure comprises a humanized VH comprising a CDR-H1 having the amino acid sequence of SEQ ID NO: 7 (according to the Kabat definition system), a CDR-H2 having the amino acid sequence of SEQ ID NO: 8, SEQ ID NO: 20, or SEQ ID NO: 24 (according to the Kabat definition system), a CDR-H3 having the amino acid sequence of SEQ ID NO: 9 (according to the Kabat definition system), and containing no more than 25 amino acid variations (e.g., no more than 25, 24, 23, 22, 21, 20, 19, 18, 17, 16, 15, 14, 13, 12, 11, 10, 9, 8, 7, 6, 5, 4, 3, 2, or 1 amino acid variation) in the framework regions as compared with the VH as set forth in SEQ ID NO: 17, SEQ ID NO: 22, or SEQ ID NO: 26. Alternatively or in addition (e.g., in addition), the humanized anti-TfR1 antibody of the present disclosure comprises a humanized VL comprising a CDR-L1 having the amino acid sequence of SEQ ID NO: 10 (according to the Kabat definition system), a CDR-L2 having the amino acid sequence of SEQ ID NO: 11 (according to the Kabat definition system), and a CDR-L3 having the amino acid sequence of SEQ ID NO: 6 (according to the Kabat definition system), and containing no more than 25 amino acid variations (e.g., no more than 25, 24, 23, 22, 21, 20, 19, 18, 17, 16, 15, 14, 13, 12, 11, 10, 9, 8, 7, 6, 5, 4, 3, 2, or 1 amino acid variation) in the framework regions as compared with the VL as set forth in SEQ ID NO: 18.

[0236] In some embodiments, the humanized anti-TfR1 antibody of the present disclosure comprises a humanized VH comprising a CDR-H1 having the amino acid sequence of SEQ ID NO: 7 (according to the Kabat definition system), a CDR-H2 having the amino acid sequence of SEQ ID NO: 8, SEQ ID NO: 20, or SEQ ID NO: 24 (according to the Kabat definition system), a CDR-H3 having the amino acid sequence of SEQ ID NO: 9 (according to the Kabat definition system), and is at least 75% (e.g., 75%, 80%, 85%, 90%, 95%, 98%, or 99%) identical in the framework regions to the VH as set forth in SEQ ID NO: 17, SEQ ID NO: 22, or SEQ ID NO: 26. Alternatively or in addition (e.g., in addition), the humanized anti-TfR1 antibody of the present disclosure comprises a humanized VL comprising a CDR-L1 having the amino acid sequence of SEQ ID NO: 10 (according to the Kabat definition system), a CDR-L2 having the amino acid sequence of SEQ ID NO: 11 (according to the Kabat definition system), and a CDR-L3 having the amino acid sequence of SEQ ID NO: 6 (according to the Kabat definition system), and is at least 75% (e.g., 75%, 80%, 85%, 90%, 95%, 98%, or 99%) identical in the framework regions to the VL as set forth in any one of SEQ ID NO: 18.

[0237] In some embodiments, the humanized anti-TfR1 antibody of the present disclosure comprises a humanized VH comprising a CDR-H1 having the amino acid sequence of SEQ ID NO: 12 (according to the Chothia definition system), a CDR-H2 having the amino acid sequence of SEQ ID NO: 13, SEQ ID NO: 21, or SEQ ID NO: 25 (according to the Chothia definition system), a CDR-H3 having the amino acid sequence of SEQ ID NO: 14 (according to the Chothia definition system), and containing no more than 25 amino acid variations (e.g., no more than 25, 24, 23, 22, 21, 20, 19, 18, 17, 16, 15, 14, 13, 12, 11, 10, 9, 8, 7, 6, 5, 4, 3, 2, or 1 amino acid variation) in the framework regions as compared with the VH as set forth in SEQ ID NO: 17, SEQ ID NO: 22 or SEQ ID NO: 26. Alternatively or in addition (e.g., in addition), the humanized anti-TfR1 antibody of the present disclosure comprises a humanized VL comprising a CDR-L1 having the amino acid sequence of SEQ ID NO: 15 (according to the Chothia definition system), a CDR-L2 having the amino acid sequence of SEQ ID NO: 5 (according to the Chothia definition system), and a CDR-L3 having the amino acid sequence of SEQ ID NO: 16 (according to the Chothia definition system), and containing no more than 25 amino acid variations (e.g., no more than 25, 24, 23, 22, 21, 20, 19, 18, 17, 16, 15, 14, 13, 12, 11, 10, 9, 8, 7, 6, 5, 4, 3, 2, or 1 amino acid variation) in the framework regions as compared with the VL as set forth in SEQ ID NO: 18.

[0238] In some embodiments, the humanized anti-TfR1 antibody of the present disclosure comprises a humanized VH comprising a CDR-H1 having the amino acid sequence of SEQ ID NO: 12 (according to the Chothia definition system), a CDR-H2 having the amino acid sequence of SEQ ID NO: 13, SEQ ID NO: 21, or SEQ ID NO: 25 (according to the Chothia definition system), a CDR-H3 having the amino acid sequence of SEQ ID NO: 14 (according to the Chothia definition system), and is at least 75% (e.g., 75%, 80%, 85%, 90%, 95%, 98%, or 99%) identical in the framework regions to the VH as set forth in SEQ ID NO: SEQ ID NO: 17, SEQ ID NO: 22 or SEQ ID NO: 26. Alternatively or in addition (e.g., in addition), the anti-TfR1 antibody of the present disclosure comprises a humanized VL comprising a CDR-L1 having the amino acid sequence of SEQ ID NO: 15 (according to the Chothia definition system), a CDR-L2 having the amino acid sequence of SEQ ID NO: 5 (according to the Chothia definition system), and a CDR-L3 having the amino acid sequence of SEQ ID NO: 16 (according to the Chothia definition system), and is at least 75% (e.g., 75%, 80%, 85%, 90%, 95%, 98%, or 99%) identical in the framework regions to the VL as set forth in any one of SEQ ID NO: 18.

[0239] In some embodiments, the humanized anti-TfR1 antibody of the present disclosure comprises a humanized VH comprising a CDR-H1 having the amino acid sequence of SEQ ID NO: 27 (according to the IMGT definition system), a CDR-H2 having the amino acid sequence of SEQ ID NO: 28 (according to the IMGT definition system), a CDR-H3 having the amino acid sequence of SEQ ID NO: 29 (according to the IMGT definition system), and containing no more than 25 amino acid variations (e.g., no more than 25, 24, 23, 22, 21, 20, 19, 18, 17, 16, 15, 14, 13, 12, 11, 10, 9, 8, 7, 6, 5, 4, 3, 2, or 1 amino acid variation) in the framework regions as compared with the VH as set forth in SEQ ID NO: 43. Alternatively or in addition (e.g., in addition), the humanized anti-TfR1 antibody of the present disclosure comprises a humanized VL comprising a CDR-L1 having the amino acid sequence of SEQ ID NO: 30 (according to the IMGT definition system), a CDR-L2 having the amino acid sequence of SEQ ID NO: 31 (according to the IMGT definition system), and a CDR-L3 having the amino acid sequence of SEQ ID NO: 32 (according to the IMGT definition system), and containing no more than 25 amino acid variations (e.g., no more than 25, 24, 23, 22, 21, 20, 19, 18, 17, 16, 15, 14, 13, 12, 11, 10, 9, 8, 7, 6, 5, 4, 3, 2, or 1 amino acid variation) in the framework regions as compared with the VL as set forth in SEQ ID NO: 44.

[0240] In some embodiments, the humanized anti-TfR1 antibody of the present disclosure comprises a humanized VH comprising a CDR-H1 having the amino acid sequence of SEQ ID NO: 27 (according to the IMGT definition system), a CDR-H2 having the amino acid sequence of SEQ ID NO: 28 (according to the IMGT definition system), a CDR-H3 having the amino acid sequence of SEQ ID NO: 29 (according to the IMGT definition system), and is at least 75% (e.g., 75%, 80%, 85%, 90%, 95%, 98%, or 99%) identical in the framework regions to the VH as set forth in SEQ ID NO: 43. Alternatively or in addition (e.g., in addition), the humanized anti-TfR1 antibody of the present disclosure comprises a humanized VL comprising a CDR-L1 having the amino acid sequence of SEQ ID NO: 30 (according to the IMGT definition system), a CDR-L2 having the amino acid sequence of SEQ ID NO: 31 (according to the IMGT definition system), and a CDR-L3 having the amino acid sequence of SEQ ID NO: 32 (according to the IMGT definition system), and is at least 75% (e.g., 75%, 80%, 85%, 90%, 95%, 98%, or 99%) identical in the framework regions to the VL as set forth in SEQ ID NO: 44.

[0241] In some embodiments, the humanized anti-TfR1 antibody of the present disclosure comprises a humanized VH comprising a CDR-H1 having the amino acid sequence of SEQ ID NO: 33 (according to the Kabat definition system), a CDR-H2 having the amino acid sequence of SEQ ID NO: 34 (according to the Kabat definition system), a CDR-H3 having the amino acid sequence of SEQ ID NO: 35 (according to the Kabat definition system), and containing no more than 25 amino acid variations (e.g., no more than 25, 24, 23, 22, 21, 20, 19, 18, 17, 16, 15, 14, 13, 12, 11, 10, 9, 8, 7, 6, 5, 4, 3, 2, or 1 amino acid variation) in the framework regions as compared with the VH as set forth in SEQ ID NO: 43. Alternatively or in addition (e.g., in addition), the humanized anti-TfR1 antibody of the present disclosure comprises a humanized VL comprising a CDR-L1 having the amino acid sequence of SEQ ID NO: 36 (according to the Kabat definition system), a CDR-L2 having the amino acid sequence of SEQ ID NO: 37 (according to the Kabat definition system), and a CDR-L3 having the amino acid sequence of SEQ ID NO: 32 (according to the Kabat definition system), and containing no more than 25 amino acid variations (e.g., no more than 25, 24, 23, 22, 21, 20, 19, 18, 17, 16, 15, 14, 13, 12, 11, 10, 9, 8, 7, 6, 5, 4, 3, 2, or 1 amino acid variation) in the framework regions as compared with the VL as set forth in SEQ ID NO: 44.

[0242] In some embodiments, the humanized anti-TfR1 antibody of the present disclosure comprises a humanized VH comprising a CDR-H1 having the amino acid sequence of SEQ ID NO: 33 (according to the Kabat definition system), a CDR-H2 having the amino acid sequence of SEQ ID NO: 34 (according to the Kabat definition system), a CDR-H3 having the amino acid sequence of SEQ ID NO: 35 (according to the Kabat definition system), and is at least 75% (e.g., 75%, 80%, 85%, 90%, 95%, 98%, or 99%) identical in the framework regions to the VH as set forth in SEQ ID NO: 43. Alternatively or in addition (e.g., in addition), the humanized anti-TfR1 antibody of the present disclosure comprises a humanized VL comprising a CDR-L1 having the amino acid sequence of SEQ ID NO: 36 (according to the Kabat definition system), a CDR-L2 having the amino acid sequence of SEQ ID NO: 37 (according to the Kabat definition system), and a CDR-L3 having the amino acid sequence of SEQ ID NO: 32 (according to the Kabat definition system), and is at least 75% (e.g., 75%, 80%, 85%, 90%, 95%, 98%, or 99%) identical in the framework regions to the VL as set forth in SEQ ID NO: 44.

[0243] In some embodiments, the humanized anti-TfR1 antibody of the present disclosure comprises a humanized VH comprising a CDR-H1 having the amino acid sequence of SEQ ID NO: 38 (according to the Chothia definition system), a CDR-H2 having the amino acid sequence of SEQ ID NO: 39 (according to the Chothia definition system), a CDR-H3 having the amino acid sequence of SEQ ID NO: 40 (according to the Chothia definition system), and containing no more than 25 amino acid variations (e.g., no more than 25, 24, 23, 22, 21, 20, 19, 18, 17, 16, 15, 14, 13, 12, 11, 10, 9, 8, 7, 6, 5, 4, 3, 2, or 1 amino acid variation) in the framework regions as compared with the VH as set forth in SEQ ID NO: 43. Alternatively or in addition (e.g., in addition), the humanized anti-TfR1 antibody of the present disclosure comprises a humanized VL comprising a CDR-L1 having the amino acid sequence of SEQ ID NO: 41 (according to the Chothia definition system), a CDR-L2 having the amino acid sequence of SEQ ID NO: 31 (according to the Chothia definition system), and a CDR-L3 having the amino acid sequence of SEQ ID NO: 42 (according to the Chothia definition system), and containing no more than 25 amino acid variations (e.g., no more than 25, 24, 23, 22, 21, 20, 19, 18, 17, 16, 15, 14, 13, 12, 11, 10, 9, 8, 7, 6, 5, 4, 3, 2, or 1 amino acid variation) in the framework regions as compared with the VL as set forth in SEQ ID NO: 44.

[0244] In some embodiments, the humanized anti-TfR1 antibody of the present disclosure comprises a humanized VH comprising a CDR-H1 having the amino acid sequence of SEQ ID NO: 38 (according to the Chothia definition system), a CDR-H2 having the amino acid sequence of SEQ ID NO: 39 (according to the Chothia definition system), a CDR-H3 having the amino acid sequence of SEQ ID NO: 40 (according to the Chothia definition system), and is at least 75% (e.g., 75%, 80%, 85%, 90%, 95%, 98%, or 99%) identical in the framework regions to the VH as set forth in SEQ ID NO: 43. Alternatively or in addition (e.g., in addition), the humanized anti-TfR1 antibody of the present disclosure comprises a humanized VL comprising a CDR-L1 having the amino acid sequence of SEQ ID NO: 41 (according to the Chothia definition system), a CDR-L2 having the amino acid sequence of SEQ ID NO: 31 (according to the Chothia definition system), and a CDR-L3 having the amino acid sequence of SEQ ID NO: 42 (according to the Chothia definition system), and is at least 75% (e.g., 75%, 80%, 85%, 90%, 95%, 98%, or 99%) identical in the framework regions to the VL as set forth in SEQ ID NO: 44.

[0245] In some embodiments, the humanized anti-TfR1 antibody of the present disclosure comprises a humanized VH comprising a CDR-H1 having the amino acid sequence of SEQ ID NO: 45, SEQ ID NO: 63, or SEQ ID NO: 66 (according to the IMGT definition system), a CDR-H2 having the amino acid sequence of SEQ ID NO: 46 (according to the IMGT definition system), a CDR-H3 having the amino acid sequence of SEQ ID NO: 47 (according to the IMGT definition system), and containing no more than 25 amino acid variations (e.g., no more than 25, 24, 23, 22, 21, 20, 19, 18, 17, 16, 15, 14, 13, 12, 11, 10, 9, 8, 7, 6, 5, 4, 3, 2, or 1 amino acid variation) in the framework regions as compared with the VH as set forth in SEQ ID NO: 61, SEQ ID NO: 65, or SEQ ID NO: 68. Alternatively or in addition (e.g., in addition), the humanized anti-TfR1 antibody of the present disclosure comprises a humanized VL comprising a CDR-L1 having the amino acid sequence of SEQ ID NO: 48 (according to the IMGT definition system), a CDR-L2 having the amino acid sequence of SEQ ID NO: 49 (according to the IMGT definition system), and a CDR-L3 having the amino acid sequence of SEQ ID NO: 50 (according to the IMGT definition system), and containing no more than 25 amino acid variations (e.g., no more than 25, 24, 23, 22, 21, 20, 19, 18, 17, 16, 15, 14, 13, 12, 11, 10, 9, 8, 7, 6, 5, 4, 3, 2, or 1 amino acid variation) in the framework regions as compared with the VL as set forth in SEQ ID NO: 62.

[0246] In some embodiments, the humanized anti-TfR1 antibody of the present disclosure comprises a humanized VH comprising a CDR-H1 having the amino acid sequence of SEQ ID NO: 45, SEQ ID NO: 63, or SEQ ID NO: 66 (according to the IMGT definition system), a CDR-H2 having the amino acid sequence of SEQ ID NO: 46 (according to the IMGT definition system), a CDR-H3 having the amino acid sequence of SEQ ID NO: 47 (according to the IMGT definition system), and is at least 75% (e.g., 75%, 80%, 85%, 90%, 95%, 98%, or 99%) identical in the framework regions to the VH as set forth in SEQ ID NO: 61, SEQ ID NO: 65, SEQ ID NO: 68. Alternatively or in addition (e.g., in addition), the humanized anti-TfR1 antibody of the present disclosure comprises a humanized VL comprising a CDR-L1 having the amino acid sequence of SEQ ID NO: 48 (according to the IMGT definition system), a CDR-L2 having the amino acid sequence of SEQ ID NO: 49 (according to the IMGT definition system), and a CDR-L3 having the amino acid sequence of SEQ ID NO: 50 (according to the IMGT definition system), and is at least 75% (e.g., 75%, 80%, 85%, 90%, 95%, 98%, or 99%) identical in the framework regions to the VL as set forth in SEQ ID NO: 62.

[0247] In some embodiments, the humanized anti-TfR1 antibody of the present disclosure comprises a humanized VH comprising a CDR-H1 having the amino acid sequence of SEQ ID NO: 51, SEQ ID NO: 64, or SEQ ID NO: 67 (according to the Kabat definition system), a CDR-H2 having the amino acid sequence of SEQ ID NO: 52 (according to the Kabat definition system), a CDR-H3 having the amino acid sequence of SEQ ID NO: 53 (according to the Kabat definition system), and containing no more than 25 amino acid variations (e.g., no more than 25, 24, 23, 22, 21, 20, 19, 18, 17, 16, 15, 14, 13, 12, 11, 10, 9, 8, 7, 6, 5, 4, 3, 2, or 1 amino acid variation) in the framework regions as compared with the VH as set forth in SEQ ID NO: 61, SEQ ID NO: 65, SEQ ID NO: 68. Alternatively or in addition (e.g., in addition), the humanized anti-TfR1 antibody of the present disclosure comprises a humanized VL comprising a CDR-L1 having the amino acid sequence of SEQ ID NO: 54 (according to the Kabat definition system), a CDR-L2 having the amino acid sequence of SEQ ID NO: 55 (according to the Kabat definition system), and a CDR-L3 having the amino acid sequence of SEQ ID NO: 50 (according to the Kabat definition system), and containing no more than 25 amino acid variations (e.g., no more than 25, 24, 23, 22, 21, 20, 19, 18, 17, 16, 15, 14, 13, 12, 11, 10, 9, 8, 7, 6, 5, 4, 3, 2, or 1 amino acid variation) in the framework regions as compared with the VL as set forth in SEQ ID NO: 62.

[0248] In some embodiments, the humanized anti-TfR1 antibody of the present disclosure comprises a humanized VH comprising a CDR-H1 having the amino acid sequence of SEQ ID NO: 51, SEQ ID NO: 64, or SEQ ID NO: 67 (according to the Kabat definition system), a CDR-H2 having the amino acid sequence of SEQ ID NO: 52 (according to the Kabat definition system), a CDR-H3 having the amino acid sequence of SEQ ID NO: 53 (according to the Kabat definition system), and is at least 75% (e.g., 75%, 80%, 85%, 90%, 95%, 98%, or 99%) identical in the framework regions to the VH as set forth in SEQ ID NO: 61, SEQ ID NO: 65, SEQ ID NO: 68. Alternatively or in addition (e.g., in addition), the humanized anti-TfR1 antibody of the present disclosure comprises a humanized VL comprising a CDR-L1 having the amino acid sequence of SEQ ID NO: 54 (according to the Kabat definition system), a CDR-L2 having the amino acid sequence of SEQ ID NO: 55 (according to the Kabat definition system), and a CDR-L3 having the amino acid sequence of SEQ ID NO: 50 (according to the Kabat definition system), and is at least 75% (e.g., 75%, 80%, 85%, 90%, 95%, 98%, or 99%) identical in the framework regions to the VL as set forth in SEQ ID NO: 62.

[0249] In some embodiments, the humanized anti-TfR1 antibody of the present disclosure comprises a humanized VH comprising a CDR-H1 having the amino acid sequence of SEQ ID NO: 56 (according to the Chothia definition system), a CDR-H2 having the amino acid sequence of SEQ ID NO: 57 (according to the Chothia definition system), a CDR-H3 having the amino acid sequence of SEQ ID NO: 58 (according to the Chothia definition system), and containing no more than 25 amino acid variations (e.g., no more than 25, 24, 23, 22, 21, 20, 19, 18, 17, 16, 15, 14, 13, 12, 11, 10, 9, 8, 7, 6, 5, 4, 3, 2, or 1 amino acid variation) in the framework regions as compared with the VH as set forth in SEQ ID NO: 61, SEQ ID NO: 65, SEQ ID NO: 68. Alternatively or in addition (e.g., in addition), the humanized anti-TfR1 antibody of the present disclosure comprises a humanized VL comprising a CDR-L1 having the amino acid sequence of SEQ ID NO: 59 (according to the Chothia definition system), a CDR-L2 having the amino acid sequence of SEQ ID NO: 49 (according to the Chothia definition system), and a CDR-L3 having the amino acid sequence of SEQ ID NO: 60 (according to the Chothia definition system), and containing no more than 25 amino acid variations (e.g., no more than 25, 24, 23, 22, 21, 20, 19, 18, 17, 16, 15, 14, 13, 12, 11, 10, 9, 8, 7, 6, 5, 4, 3, 2, or 1 amino acid variation) in the framework regions as compared with the VL as set forth in SEQ ID NO: 62.

[0250] In some embodiments, the humanized anti-TfR1 antibody of the present disclosure comprises a humanized VH comprising a CDR-H1 having the amino acid sequence of SEQ ID NO: 56 (according to the Chothia definition system), a CDR-H2 having the amino acid sequence of SEQ ID NO: 57 (according to the Chothia definition system), a CDR-H3 having the amino acid sequence of SEQ ID NO: 58 (according to the Chothia definition system), and is at least 75% (e.g., 75%, 80%, 85%, 90%, 95%, 98%, or 99%) identical in the framework regions to the VH as set forth in SEQ ID NO: 61, SEQ ID NO: 65, SEQ ID NO: 68. Alternatively or in addition (e.g., in addition), the humanized anti-TfR1 antibody of the present disclosure comprises a humanized VL comprising a CDR-L1 having the amino acid sequence of SEQ ID NO: 59 (according to the Chothia definition system), a CDR-L2 having the amino acid sequence of SEQ ID NO: 49 (according to the Chothia definition system), and a CDR-L3 having the amino acid sequence of SEQ ID NO: 60 (according to the Chothia definition system), and is at least 75% (e.g., 75%, 80%, 85%, 90%, 95%, 98%, or 99%) identical in the framework regions to the VL as set forth in SEQ ID NO: 62.

[0251] Examples of amino acid sequences of the humanized anti-TfR1 antibodies described herein are provided in Table 3.

TABLE 3
Variable Regions of Humanized Anti-TfR1 Antibodies

| Antibody | Variable Region Amino Acid Sequence** |
|---|---|
| 3A4 | V_{H}: |
| VH3 (N54T*)/Vκ4 | EVQLVQSGSELKKPGASVKVSCTASGFNIKDDYMYWVRQPPGKGLEWIGWIDP |
| | ETGDTEYASKFQDRVTVTADTSTNTAYMELSSLRSEDTAVYYCTLWLRRGLD |
| | YWGQGTLVTVSS (SEQ ID NO: 69) |
| | V_{L}: |
| | DIVMTQSPLSLPVTPGEPASISCRSSKSLLHSNGYTYLFWFQQRPGQSPRLLIYR |
| | MSNLASGVPDRFSGSGSGTDFTLKISRVEAEDVGVYYCMQHLEYPFTFGGGTK |
| | VEIK (SEQ ID NO: 70) |
| 3A4 | V_{H}: |
| VH3 (N54S*)/Vκ4 | EVQLVQSGSELKKPGASVKVSCTASGFNIKDDYMYWVRQPPGKGLEWIGWIDP |
| | ESGDTEYASKFQDRVTVTADTSTNTAYMELSSLRSEDTAVYYCTLWLRRGLD |
| | YWGQGTLVTVSS (SEQ ID NO: 71) |
| | V_{L}: |
| | DIVMTQSPLSLPVTPGEPASISCRSSKSLLHSNGYTYLFWFQQRPGQSPRLLIYR |
| | MSNLASGVPDRFSGSGSGTDFTLKISRVEAEDVGVYYCMQHLEYPFTFGGGTK |
| | VEIK (SEQ ID NO: 70) |
| 3A4 | V_{H}: |
| VH3/Vκ4 | EVQLVQSGSELKKPGASVKVSCTASGFNIKDDYMYWVRQPPGKGLEWIGWIDP |
| | ENGDTEYASKFQDRVTVTADTSTNTAYMELSSLRSEDTAVYYCTLWLRRGLD |
| | YWGQGTLVTVSS (SEQ ID NO: 72) |
| | V_{L}: |
| | DIVMTQSPLSLPVTPGEPASISCRSSKSLLHSNGYTYLFWFQQRPGQSPRLLIYR |
| | MSNLASGVPDRFSGSGSGTDFTLKISRVEAEDVGVYYCMQHLEYPFTFGGGTK |
| | VEIK (SEQ ID NO: 70) |
| 3M12 | V_{H}: |
| VH3/Vκ2 | QVQLQESGPGLVKPSQTLSLTCSVTGYSITSGYYWNWIRQPPGKGLEWMGYITF |
| | DGANNYNPSLKNRVSISRDTSKNQFSLKLSSVTAEDTATYYCTRSSYDYDVLDY |
| | WGQGTTVTVSS (SEQ ID NO: 73) |
| | V_{L}: |
| | DIQMTQSPSSLSASVGDRVTITCRASQDISNFLNWYQQKPGQPVKLLIYYTSRLH |
| | SGVPSRFSGSGSGTDFTLTISSLQPEDFATYFCQQGHTLPYTFGQGTKLEIK (SEQ |
| | ID NO: 74) |
| 3M12 | V_{H}: |
| VH3/Vκ3 | QVQLQESGPGLVKPSQTLSLTCSVTGYSITSGYYWNWIRQPPGKGLEWMGYITF |
| | DGANNYNPSLKNRVSISRDTSKNQFSLKLSSVTAEDTATYYCTRSSYDYDVLDY |
| | WGQGTTVTVSS (SEQ ID NO: 73) |
| | V_{L}: |
| | DIQMTQSPSSLSASVGDRVTITCRASQDISNFLNWYQQKPGQPVKLLIYYTSRLH |
| | SGVPSRFSGSGSGTDFTLTISSLQPEDFATYYCQQGHTLPYTFGQGTKLEIK (SEQ |
| | ID NO: 75) |
| 3M12 | V_{H}: |
| VH4/Vκ2 | QVQLQESGPGLVKPSQTLSLTCTVTGYSITSGYYWNWIRQPPGKGLEWIGYITFD |
| | GANNYNPSLKNRVSISRDTSKNQFSLKLSSVTAEDTATYYCTRSSYDYDVLDYW |
| | GQGTTVTVSS (SEQ ID NO: 76) |
| | V_{L}: |
| | DIQMTQSPSSLSASVGDRVTITCRASQDISNFLNWYQQKPGQPVKLLIYYTSRLH |
| | SGVPSRFSGSGSGTDFTLTISSLQPEDFATYFCQQGHTLPYTFGQGTKLEIK (SEQ |
| | ID NO: 74) |
| 3M12 | V_{H}: |
| VH4/Vκ3 | QVQLQESGPGLVKPSQTLSLTCTVTGYSITSGYYWNWIRQPPGKGLEWIGYITFD |
| | GANNYNPSLKNRVSISRDTSKNQFSLKLSSVTAEDTATYYCTRSSYDYDVLDYW |
| | GQGTTVTVSS (SEQ ID NO: 76) |
| | V_{L}: |
| | DIQMTQSPSSLSASVGDRVTITCRASQDISNFLNWYQQKPGQPVKLLIYYTSRLH |
| | SGVPSRFSGSGSGTDFTLTISSLQPEDFATYYCQQGHTLPYTFGQGTKLEIK (SEQ |
| | ID NO: 75) |
| 5H12 | V_{H}: |
| VH5 (C33Y*)/Vκ3 | QVQLVQSGAEVKKPGASVKVSCKASGYSFTDYYINWVRQAPGQGLEWMGWIY |
| | PGSGNTRYSERFKGRVTITRDTSASTAYMELSSLRSEDTAVYYCAREDYYPYH |
| | GMDYWGQGTLVTVSS (SEQ ID NO: 77) |
| | V_{L}: |
| | DIVLTQSPDSLAVSLGERATINCRASESVDGYDNSFMHWYQQKPGQPPKLLIFR |
| | ASNLESGVPDRFSGSGSRTDFTLTISSLQAEDVAVYYCQQSSEDPWTFGQGTKL |
| | EIK (SEQ ID NO: 78) |
| 5H12 | V_{H}: |
| VH5 (C33D*)/Vκ4 | QVQLVQSGAEVKKPGASVKVSCKASGYSFTDYDINWVRQAPGQGLEWMGWIY |
| | PGSGNTRYSERFKGRVTITRDTSASTAYMELSSLRSEDTAVYYCAREDYYPYH |
| | GMDYWGQGTLVTVSS (SEQ ID NO: 79) |
| | V_{L}: |
| | DIVMTQSPDSLAVSLGERATINCRASESVDGYDNSFMHWYQQKPGQPPKLLIFR |
| | ASNLESGVPDRFSGSGSGTDFTLTISSLQAEDVAVYYCQQSSEDPWTFGQGTKL |
| | EIK (SEQ ID NO: 80) |
| 5H12 | V_{H}: |
| VH5 (C33Y*)/Vκ4 | QVQLVQSGAEVKKPGASVKVSCKASGYSFTDYYINWVRQAPGQGLEWMGWIY |
| | PGSGNTRYSERFKGRVTITRDTSASTAYMELSSLRSEDTAVYYCAREDYYPYH |
| | GMDYWGQGTLVTVSS (SEQ ID NO: 77) |
| | V_{L}: |
| | DIVMTQSPDSLAVSLGERATINCRASESVDGYDNSFMHWYQQKPGQPPKLLIFR |
| | ASNLESGVPDRFSGSGSGTDFTLTISSLQAEDVAVYYCQQSSEDPWTFGQGTKL |
| | EIK (SEQ ID NO: 80) |

*mutation positions are according to Kabat numbering of the respective VH sequences containing the mutations
**CDRs according to the Kabat numbering system are bolded

[0252] In some embodiments, the humanized anti-TfR1 antibody of the present disclosure comprises a humanized VH comprising the CDR-H1, CDR-H2, and CDR-H3 of any one of the anti-TfR1 antibodies provided in Table 2 and comprises one or more (e.g., 1, 2, 3, 4, 5, 6, 7, 8, 9, 10 or more) amino acid variations in the framework regions as compared with the respective humanized VH provided in Table 3. Alternatively or in addition (e.g., in addition), the humanized anti-TfR1 antibody of the present disclosure comprises a humanized VL comprising the CDR-L1, CDR-L2, and CDR-L3 of any one of the anti-TfR1 antibodies provided in Table 2 and comprises one or more (e.g., 1, 2, 3, 4, 5, 6, 7, 8, 9, 10 or more) amino acid variations in the framework regions as compared with the respective humanized VL provided in Table 3.

[0253] In some embodiments, the humanized anti-TfR1 antibody of the present disclosure comprises a humanized VH comprising an amino acid sequence that is at least 80% (e.g., 80%, 85%, 90%, 95%, 98%, or 99%) identical to SEQ ID NO: 69, and/or (e.g., and) a humanized VL comprising an amino acid sequence that is at least 80% identical (e.g., 80%, 85%, 90%, 95%, 98%, or 99%) to SEQ ID NO: 70. In some embodiments, the humanized anti-TfR1 antibody of the present disclosure comprises a humanized VH comprising the amino acid sequence of SEQ ID NO: 69 and a humanized VL comprising the amino acid sequence of SEQ ID NO: 70.

[0254] In some embodiments, the humanized anti-TfR1 antibody of the present disclosure comprises a humanized VH comprising an amino acid sequence that is at least 80% (e.g., 80%, 85%, 90%, 95%, 98%, or 99%) identical to SEQ ID NO: 71, and/or (e.g., and) a humanized VL comprising an amino acid sequence that is at least 80% identical (e.g., 80%, 85%, 90%, 95%, 98%, or 99%) to SEQ ID NO: 70. In some embodiments, the humanized anti-TfR1 antibody of the present disclosure comprises a humanized VH comprising the amino acid sequence of SEQ ID NO: 71 and a humanized VL comprising the amino acid sequence of SEQ ID NO: 70.

[0255] In some embodiments, the humanized anti-TfR1 antibody of the present disclosure comprises a humanized VH comprising an amino acid sequence that is at least 80% (e.g., 80%, 85%, 90%, 95%, 98%, or 99%) identical to SEQ ID NO: 72, and/or (e.g., and) a humanized VL comprising an amino acid sequence that is at least 80% identical (e.g., 80%, 85%, 90%, 95%, 98%, or 99%) to SEQ ID NO: 70. In some embodiments, the humanized anti-TfR1 antibody of the present disclosure comprises a humanized VH comprising the amino acid sequence of SEQ ID NO: 72 and a humanized VL comprising the amino acid sequence of SEQ ID NO: 70.

[0256] In some embodiments, the humanized anti-TfR1 antibody of the present disclosure comprises a humanized VH comprising an amino acid sequence that is at least 80% (e.g., 80%, 85%, 90%, 95%, 98%, or 99%) identical to SEQ ID NO: 73, and/or (e.g., and) a humanized VL comprising an amino acid sequence that is at least 80% identical (e.g., 80%, 85%, 90%, 95%, 98%, or 99%) to SEQ ID NO: 74. In some embodiments, the humanized anti-TfR1 antibody of the present disclosure comprises a humanized VH comprising the amino acid sequence of SEQ ID NO: 73 and a humanized VL comprising the amino acid sequence of SEQ ID NO: 74.

[0257] In some embodiments, the humanized anti-TfR1 antibody of the present disclosure comprises a humanized VH comprising an amino acid sequence that is at least 80% (e.g., 80%, 85%, 90%, 95%, 98%, or 99%) identical to SEQ ID NO: 73, and/or (e.g., and) a humanized VL comprising an amino acid sequence that is at least 80% identical (e.g., 80%, 85%, 90%, 95%, 98%, or 99%) to SEQ ID NO: 75. In some embodiments, the humanized anti-TfR1 antibody of the present disclosure comprises a humanized VH comprising the amino acid sequence of SEQ ID NO: 73 and a humanized VL comprising the amino acid sequence of SEQ ID NO: 75.

[0258] In some embodiments, the humanized anti-TfR1 antibody of the present disclosure comprises a humanized VH comprising an amino acid sequence that is at least 80% (e.g., 80%, 85%, 90%, 95%, 98%, or 99%) identical to SEQ ID NO: 76, and/or (e.g., and) a humanized VL comprising an amino acid sequence that is at least 80% identical (e.g., 80%, 85%, 90%, 95%, 98%, or 99%) to SEQ ID NO: 74. In some embodiments, the humanized anti-TfR1 antibody of the present disclosure comprises a humanized VH comprising the amino acid sequence of SEQ ID NO: 76 and a humanized VL comprising the amino acid sequence of SEQ ID NO: 74.

[0259] In some embodiments, the humanized anti-TfR1 antibody of the present disclosure comprises a humanized VH comprising an amino acid sequence that is at least 80% (e.g., 80%, 85%, 90%, 95%, 98%, or 99%) identical to SEQ ID NO: 76, and/or (e.g., and) a humanized VL comprising an amino acid sequence that is at least 80% identical (e.g., 80%, 85%, 90%, 95%, 98%, or 99%) to SEQ ID NO: 75. In some embodiments, the humanized anti-TfR1 antibody of the present disclosure comprises a humanized VH comprising the amino acid sequence of SEQ ID NO: 76 and a humanized VL comprising the amino acid sequence of SEQ ID NO: 75.

[0260] In some embodiments, the humanized anti-TfR1 antibody of the present disclosure comprises a humanized VH comprising an amino acid sequence that is at least 80% (e.g., 80%, 85%, 90%, 95%, 98%, or 99%) identical to SEQ ID NO: 77, and/or (e.g., and) a humanized VL comprising an amino acid sequence that is at least 80% identical (e.g., 80%, 85%, 90%, 95%, 98%, or 99%) to SEQ ID NO: 78. In some embodiments, the humanized anti-TfR1 antibody of the present disclosure comprises a humanized VH comprising the amino acid sequence of SEQ ID NO: 77 and a humanized VL comprising the amino acid sequence of SEQ ID NO: 78.

[0261] In some embodiments, the humanized anti-TfR1 antibody of the present disclosure comprises a humanized VH comprising an amino acid sequence that is at least 80% (e.g., 80%, 85%, 90%, 95%, 98%, or 99%) identical to SEQ ID NO: 79, and/or (e.g., and) a humanized VL comprising an amino acid sequence that is at least 80% identical (e.g., 80%, 85%, 90%, 95%, 98%, or 99%) to SEQ ID NO: 80. In some embodiments, the humanized anti-TfR1 antibody of the present disclosure comprises a humanized VH comprising the amino acid sequence of SEQ ID NO: 79 and a humanized VL comprising the amino acid sequence of SEQ ID NO: 80.

[0262] In some embodiments, the humanized anti-TfR1 antibody of the present disclosure comprises a humanized VH comprising an amino acid sequence that is at least 80% (e.g., 80%, 85%, 90%, 95%, 98%, or 99%) identical to SEQ ID NO: 77, and/or (e.g., and) a humanized VL comprising an amino acid sequence that is at least 80% identical (e.g., 80%, 85%, 90%, 95%, 98%, or 99%) to SEQ ID NO: 80. In some embodiments, the humanized anti-TfR1 antibody of the present disclosure comprises a humanized VH comprising the amino acid sequence of SEQ ID NO: 77 and a humanized VL comprising the amino acid sequence of SEQ ID NO: 80.

[0263] In some embodiments, the humanized anti-TfR1 antibody described herein is a full-length IgG, which can include a heavy constant region and a light constant region from a human antibody. In some embodiments, the heavy chain of any of the anti-TfR1 antibodies as described herein may comprise a heavy chain constant region (CH) or a portion thereof (e.g., CH1, CH2, CH3, or a combination thereof). The heavy chain constant region can be of any suitable origin, e.g., human, mouse, rat, or rabbit. In one specific example, the heavy chain constant region is from a human IgG (a gamma heavy chain), e.g., IgG1, IgG2, or IgG4. An example of a human IgG1 constant region is given below:

(SEQ ID NO: 81)
[sequence omitted]

[0264] In some embodiments, the heavy chain of any of the anti-TfR1 antibodies described herein comprises a mutant human IgG1 constant region. For example, the introduction of LALA mutations (a mutant derived from mAb b12 that has been mutated to replace the lower hinge residues Leu234 Leu235 with Ala234 and Ala235) in the CH2 domain of human IgG1 is known to reduce Fcγ receptor binding (Bruhns, P., et al. (2009) and Xu, D. et al. (2000)). The mutant human IgG1 constant region is provided below (mutations bonded and underlined):

(SEQ ID NO: 82)
ASTKGPSVFPLAPSSKSTSGGTAALGCLVKDYFPEPVTVSWNSGALTSG
VHTFPAVLQSSGLYSLSSVVTVPSSSLGTQTYICNVNHKPSNTKVDKKV
EPKSCDKTHTCPPCPAPEAAGGPSVFLFPPKPKDTLMISRTPEVTCVVV
DVSHEDPEVKFNWYVDGVEVHNAKTKPREEQYNSTYRVVSVLTVLHQDW
LNGKEYKCKVSNKALPAPIEKTISKAKGQPREPQVYTLPPSRDELTKNQ
VSLTCLVKGFYPSDIAVEWESNGQPENNYKTTPPVLDSDGSFFLYSKLT
VDKSRWQQGNVFSCSVMHEALHNHYTQKSLSLSPGK

[0265] In some embodiments, the light chain of any of the anti-TfR1 antibodies described herein may further comprise a light chain constant region (CL), which can be any CL known in the art. In some examples, the CL is a kappa light chain. In other examples, the CL is a lambda light chain. In some embodiments, the CL is a kappa light chain, the sequence of which is provided below:

(SEQ ID NO: 83)
RTVAAPSVFIFPPSDEQLKSGTASVVCLLNNFYPREAKVQWKVDNALQS
GNSQESVTEQDSKDSTYSLSSTLTLSKADYEKHKVYACEVTHQGLSSPV
TKSFNRGEC

[0266] Other antibody heavy and light chain constant regions are well known in the art, e.g., those provided in the IMGT database (www.imgt.org) or at www.vbase2.org/vbstat.php., both of which are incorporated by reference herein.

[0267] In some embodiments, the humanized anti-TfR1 antibody described herein comprises a heavy chain comprising any one of the VH as listed in Table 3 or any variants thereof and a heavy chain constant region that is at least 80%, at least 85%, at least 90%, at least 95%, or at least 99% identical to SEQ ID NO: 81 or SEQ ID NO: 82. In some embodiments, the humanized anti-TfR1 antibody described herein comprises a heavy chain comprising any one of the VH as listed in Table 3 or any variants thereof and a heavy chain constant region that contains no more than 25 amino acid variations (e.g., no more than 25, 24, 23, 22, 21, 20, 19, 18, 17, 16, 15, 14, 13, 12, 11, 10, 9, 8, 7, 6, 5, 4, 3, 2, or 1 amino acid variation) as compared with SEQ ID NO: 81 or SEQ ID NO: 82. In some embodiments, the humanized anti-TfR1 antibody described herein comprises a heavy chain comprising any one of the VH as listed in Table 3 or any variants thereof and a heavy chain constant region as set forth in SEQ ID NO: 81. In some embodiments, the humanized anti-TfR1 antibody described herein comprises heavy chain comprising any one of the VH as listed in Table 3 or any variants thereof and a heavy chain constant region as set forth in SEQ ID NO: 82.

[0268] In some embodiments, the humanized anti-TfR1 antibody described herein comprises a light chain comprising any one of the VL as listed in Table 3 or any variants thereof and a light chain constant region that is at least 80%, at least 85%, at least 90%, at least 95%, or at least 99% identical to SEQ ID NO: 83. In some embodiments, the humanized anti-TfR1 antibody described herein comprises a light chain comprising any one of the VL as listed in Table 3 or any variants thereof and a light chain constant region contains no more than 25 amino acid variations (e.g., no more than 25, 24, 23, 22, 21, 20, 19, 18, 17, 16, 15, 14, 13, 12, 11, 10, 9, 8, 7, 6, 5, 4, 3, 2, or 1 amino acid variation) as compared with SEQ ID NO: 83. In some embodiments, the humanized anti-TfR1 antibody described herein comprises a light chain comprising any one of the VL as listed in Table 3 or any variants thereof and a light chain constant region set forth in SEQ ID NO: 83.

[0269] Examples of IgG heavy chain and light chain amino acid sequences of the anti-TfR1 antibodies described are provided in Table 4 below.

TABLE 4
Heavy chain and light chain sequences of examples of humanized anti-TfR1 IgGs

| Antibody | IgG Heavy Chain/Light Chain Sequences** |
|---|---|
| 3A4 | Heavy Chain (with wild type human IgG1 constant region) |
| VH3 (N54T*)/Vκ4 | EVQLVQSGSELKKPGASVKVSCTASGFNIKDDYMYWVRQPPGKGLEWIGW |
| | IDPETGDTEYASKFQDRVTVTADTSTNTAYMELSSLRSEDTAVYYCTLWL |
| | RRGLDYWGQGTLVTVSSASTKGPSVFPLAPSSKSTSGGTAALGCLVKDYFP |
| | EPVTVSWNSGALTSGVHTFPAVLQSSGLYSLSSVVTVPSSSLGTQTYICNVN |
| | HKPSNTKVDKKVEPKSCDKTHTCPPCPAPELLGGPSVFLFPPKPKDTLMISRT |
| | PEVTCVVVDVSHEDPEVKFNWYVDGVEVHNAKTKPREEQYNSTYRVVSVL |
| | TVLHQDWLNGKEYKCKVSNKALPAPIEKTISKAKGQPREPQVYTLPPSRDEL |
| | TKNQVSLTCLVKGFYPSDIAVEWESNGQPENNYKTTPPVLDSDGSFFLYSKL |
| | TVDKSRWQQGNVFSCSVMHEALHNHYTQKSLSLSPGK (SEQ ID NO: 84) |
| | Light Chain (with kappa light chain constant region) |
| | DIVMTQSPLSLPVTPGEPASISCRSSKSLLHSNGYTYLFWFQQRPGQSPRLLI |
| | YRMSNLASGVPDRFSGSGSGTDFTLKISRVEAEDVGVYYCMQHLEYPFTF |
| | GGGTKVEIKRTVAAPSVFIFPPSDEQLKSGTASVVCLLNNFYPREAKVQWKV |
| | DNALQSGNSQESVTEQDSKDSTYSLSSTLTLSKADYEKHKVYACEVTHQGL |
| | SSPVTKSFNRGEC (SEQ ID NO: 85) |
| 3A4 | Heavy Chain (with wild type human IgG1 constant region) |
| VH3 (N54S*)/Vκ4 | EVQLVQSGSELKKPGASVKVSCTASGFNIKDDYMYWVRQPPGKGLEWIGW |
| | IDPESGDTEYASKFQDRVTVTADTSTNTAYMELSSLRSEDTAVYYCTLWL |
| | RRGLDYWGQGTLVTVSSASTKGPSVFPLAPSSKSTSGGTAALGCLVKDYFP |
| | EPVTVSWNSGALTSGVHTFPAVLQSSGLYSLSSVVTVPSSSLGTQTYICNVN |
| | HKPSNTKVDKKVEPKSCDKTHTCPPCPAPELLGGPSVFLFPPKPKDTLMISRT |
| | PEVTCVVVDVSHEDPEVKFNWYVDGVEVHNAKTKPREEQYNSTYRVVSVL |
| | TVLHQDWLNGKEYKCKVSNKALPAPIEKTISKAKGQPREPQVYTLPPSRDEL |
| | TKNQVSLTCLVKGFYPSDIAVEWESNGQPENNYKTTPPVLDSDGSFFLYSKL |
| | TVDKSRWQQGNVFSCSVMHEALHNHYTQKSLSLSPGK (SEQ ID NO: 86) |
| | Light Chain (with kappa light chain constant region) |
| | DIVMTQSPLSLPVTPGEPASISCRSSKSLLHSNGYTYLFWFQQRPGQSPRLLI |
| | YRMSNLASGVPDRFSGSGSGTDFTLKISRVEAEDVGVYYCMQHLEYPFTF |
| | GGGTKVEIKRTVAAPSVFIFPPSDEQLKSGTASVVCLLNNFYPREAKVQWKV |
| | DNALQSGNSQESVTEQDSKDSTYSLSSTLTLSKADYEKHKVYACEVTHQGL |
| | SSPVTKSFNRGEC (SEQ ID NO: 85) |
| 3A4 | Heavy Chain (with wild type human IgG1 constant region) |
| VH3/Vκ4 | EVQLVQSGSELKKPGASVKVSCTASGFNIKDDYMYWVRQPPGKGLEWIGW |
| | IDPENGDTEYASKFQDRVTVTADTSTNTAYMELSSLRSEDTAVYYCTLWL |
| | RRGLDYWGQGTLVTVSSASTKGPSVFPLAPSSKSTSGGTAALGCLVKDYFP |
| | EPVTVSWNSGALTSGVHTFPAVLQSSGLYSLSSVVTVPSSSLGTQTYICNVN |
| | HKPSNTKVDKKVEPKSCDKTHTCPPCPAPELLGGPSVFLFPPKPKDTLMISRT |
| | PEVTCVVVDVSHEDPEVKFNWYVDGVEVHNAKTKPREEQYNSTYRVVSVL |
| | TVLHQDWLNGKEYKCKVSNKALPAPIEKTISKAKGQPREPQVYTLPPSRDEL |
| | TKNQVSLTCLVKGFYPSDIAVEWESNGQPENNYKTTPPVLDSDGSFFLYSKL |
| | TVDKSRWQQGNVFSCSVMHEALHNHYTQKSLSLSPGK (SEQ ID NO: 87) |
| | Light Chain (with kappa light chain constant region) |
| | DIVMTQSPLSLPVTPGEPASISCRSSKSLLHSNGYTYLFWFQQRPGQSPRLLI |
| | YRMSNLASGVPDRFSGSGSGTDFTLKISRVEAEDVGVYYCMQHLEYPFTF |
| | GGGTKVEIKRTVAAPSVFIFPPSDEQLKSGTASVVCLLNNFYPREAKVQWKV |
| | DNALQSGNSQESVTEQDSKDSTYSLSSTLTLSKADYEKHKVYACEVTHQGL |
| | SSPVTKSFNRGEC (SEQ ID NO: 85) |
| 3M12 | Heavy Chain (with wild type human IgG1 constant region) |
| VH3/Vκ2 | QVQLQESGPGLVKPSQTLSLTCSVTGYSITSGYYWNWIRQPPGKGLEWMGY |
| | ITFDGANNYNPSLKNRVSISRDTSKNQFSLKLSSVTAEDTATYYCTRSSYDY |
| | DVLDYWGQGTTVTVSSASTKGPSVFPLAPSSKSTSGGTAALGCLVKDYFPE |
| | PVTVSWNSGALTSGVHTFPAVLQSSGLYSLSSVVTVPSSSLGTQTYICNVNH |
| | KPSNTKVDKKVEPKSCDKTHTCPPCPAPELLGGPSVFLFPPKPKDTLMISRTP |
| | EVTCVVVDVSHEDPEVKFNWYVDGVEVHNAKTKPREEQYNSTYRVVSVLT |
| | VLHQDWLNGKEYKCKVSNKALPAPIEKTISKAKGQPREPQVYTLPPSRDELT |
| | KNQVSLTCLVKGFYPSDIAVEWESNGQPENNYKTTPPVLDSDGSFFLYSKLT |
| | VDKSRWQQGNVFSCSVMHEALHNHYTQKSLSLSPGK (SEQ ID NO: 88) |
| | Light Chain (with kappa light chain constant region) |
| | DIQMTQSPSSLSASVGDRVTITCRASQDISNFLNWYQQKPGQPVKLLIYYTS |
| | RLHSGVPSRFSGSGSGTDFTLTISSLQPEDFATYFCQQGHTLPYTFGQGTKL |
| | EIKRTVAAPSVFIFPPSDEQLKSGTASVVCLLNNFYPREAKVQWKVDNALQS |
| | GNSQESVTEQDSKDSTYSLSSTLTLSKADYEKHKVYACEVTHQGLSSPVTKS |
| | FNRGEC (SEQ ID NO: 89) |
| 3M12 | Heavy Chain (with wild type human IgG1 constant region) |
| VH3/Vκ3 | QVQLQESGPGLVKPSQTLSLTCSVTGYSITSGYYWNWIRQPPGKGLEWMGY |
| | ITFDGANNYNPSLKNRVSISRDTSKNQFSLKLSSVTAEDTATYYCTRSSYDY |
| | DVLDYWGQGTTVTVSSASTKGPSVFPLAPSSKSTSGGTAALGCLVKDYFPE |
| | PVTVSWNSGALTSGVHTFPAVLQSSGLYSLSSVVTVPSSSLGTQTYICNVNH |
| | KPSNTKVDKKVEPKSCDKTHTCPPCPAPELLGGPSVFLFPPKPKDTLMISRTP |
| | EVTCVVVDVSHEDPEVKFNWYVDGVEVHNAKTKPREEQYNSTYRVVSVLT |
| | VLHQDWLNGKEYKCKVSNKALPAPIEKTISKAKGQPREPQVYTLPPSRDELT |
| | KNQVSLTCLVKGFYPSDIAVEWESNGQPENNYKTTPPVLDSDGSFFLYSKLT |
| | VDKSRWQQGNVFSCSVMHEALHNHYTQKSLSLSPGK (SEQ ID NO: 88) |
| | Light Chain (with kappa light chain constant region) |
| | DIQMTQSPSSLSASVGDRVTITCRASQDISNFLNWYQQKPGQPVKLLIYYTS |
| | RLHSGVPSRFSGSGSGTDFTLTISSLQPEDFATYYCQQGHTLPYTFGQGTKL |
| | EIKRTVAAPSVFIFPPSDEQLKSGTASVVCLLNNFYPREAKVQWKVDNALQS |
| | GNSQESVTEQDSKDSTYSLSSTLTLSKADYEKHKVYACEVTHQGLSSPVTKS |
| | FNRGEC (SEQ ID NO: 90) |
| 3M12 | Heavy Chain (with wild type human IgG1 constant region) |
| VH4/Vκ2 | QVQLQESGPGLVKPSQTLSLTCTVTGYSITSGYYWNWIRQPPGKGLEWIGYI |
| | TFDGANNYNPSLKNRVSISRDTSKNQFSLKLSSVTAEDTATYYCTRSSYDY |
| | DVLDYWGQGTTVTVSSASTKGPSVFPLAPSSKSTSGGTAALGCLVKDYFPE |
| | PVTVSWNSGALTSGVHTFPAVLQSSGLYSLSSVVTVPSSSLGTQTYICNVNH |
| | KPSNTKVDKKVEPKSCDKTHTCPPCPAPELLGGPSVFLFPPKPKDTLMISRTP |
| | EVTCVVVDVSHEDPEVKFNWYVDGVEVHNAKTKPREEQYNSTYRVVSVLT |
| | VLHQDWLNGKEYKCKVSNKALPAPIEKTISKAKGQPREPQVYTLPPSRDELT |
| | KNQVSLTCLVKGFYPSDIAVEWESNGQPENNYKTTPPVLDSDGSFFLYSKLT |
| | VDKSRWQQGNVFSCSVMHEALHNHYTQKSLSLSPGK (SEQ ID NO: 91) |
| | Light Chain (with kappa light chain constant region) |
| | DIQMTQSPSSLSASVGDRVTITCRASQDISNFLNWYQQKPGQPVKLLIYYTS |
| | RLHSGVPSRFSGSGSGTDFTLTISSLQPEDFATYFCQQGHTLPYTFGQGTKL |
| | EIKRTVAAPSVFIFPPSDEQLKSGTASVVCLLNNFYPREAKVQWKVDNALQS |
| | GNSQESVTEQDSKDSTYSLSSTLTLSKADYEKHKVYACEVTHQGLSSPVTKS |
| | FNRGEC (SEQ ID NO: 89) |
| 3M12 | Heavy Chain (with wild type human IgG1 constant region) |
| VH4/Vκ3 | QVQLQESGPGLVKPSQTLSLTCTVTGYSITSGYYWNWIRQPPGKGLEWIGYI |
| | TFDGANNYNPSLKNRVSISRDTSKNQFSLKLSSVTAEDTATYYCTRSSYDY |
| | DVLDYWGQGTTVTVSSASTKGPSVFPLAPSSKSTSGGTAALGCLVKDYFPE |
| | PVTVSWNSGALTSGVHTFPAVLQSSGLYSLSSVVTVPSSSLGTQTYICNVNH |
| | KPSNTKVDKKVEPKSCDKTHTCPPCPAPELLGGPSVFLFPPKPKDTLMISRTP |
| | EVTCVVVDVSHEDPEVKFNWYVDGVEVHNAKTKPREEQYNSTYRVVSVLT |
| | VLHQDWLNGKEYKCKVSNKALPAPIEKTISKAKGQPREPQVYTLPPSRDELT |
| | KNQVSLTCLVKGFYPSDIAVEWESNGQPENNYKTTPPVLDSDGSFFLYSKLT |
| | VDKSRWQQGNVFSCSVMHEALHNHYTQKSLSLSPGK (SEQ ID NO: 91) |
| | Light Chain (with kappa light chain constant region) |
| | DIQMTQSPSSLSASVGDRVTITCRASQDISNFLNWYQQKPGQPVKLLIYYTS |
| | RLHSGVPSRFSGSGSGTDFTLTISSLQPEDFATYYCQQGHTLPYTFGQGTKL |
| | EIKRTVAAPSVFIFPPSDEQLKSGTASVVCLLNNFYPREAKVQWKVDNALQS |
| | GNSQESVTEQDSKDSTYSLSSTLTLSKADYEKHKVYACEVTHQGLSSPVTKS |
| | FNRGEC (SEQ ID NO: 90) |
| 5H12 | Heavy Chain (with wild type human IgG1 constant region) |
| VH5 (C33Y*)/Vκ3 | QVQLVQSGAEVKKPGASVKVSCKASGYSFTDYYINWVRQAPGQGLEWMG |
| | WIYPGSGNTRYSERFKGRVTITRDTSASTAYMELSSLRSEDTAVYYCARED |
| | YYPYHGMDYWGQGTLVTVSSASTKGPSVFPLAPSSKSTSGGTAALGCLVK |
| | DYFPEPVTVSWNSGALTSGVHTFPAVLQSSGLYSLSSVVTVPSSSLGTQTYIC |
| | NVNHKPSNTKVDKKVEPKSCDKTHTCPPCPAPELLGGPSVFLFPPKPKDTLM |
| | ISRTPEVTCVVVDVSHEDPEVKFNWYVDGVEVHNAKTKPREEQYNSTYRV |
| | VSVLTVLHQDWLNGKEYKCKVSNKALPAPIEKTISKAKGQPREPQVYTLPPS |
| | RDELTKNQVSLTCLVKGFYPSDIAVEWESNGQPENNYKTTPPVLDSDGSFFL |
| | YSKLTVDKSRWQQGNVFSCSVMHEALHNHYTQKSLSLSPGK (SEQ ID NO: |
| | 92) |
| | Light Chain (with kappa light chain constant region) |
| | DIVLTQSPDSLAVSLGERATINCRASESVDGYDNSFMHWYQQKPGQPPKLL |
| | IFRASNLESGVPDRFSGSGSRTDFTLTISSLQAEDVAVYYCQQSSEDPWTFG |
| | QGTKLEIKRTVAAPSVFIFPPSDEQLKSGTASVVCLLNNFYPREAKVQWKVD |
| | NALQSGNSQESVTEQDSKDSTYSLSSTLTLSKADYEKHKVYACEVTHQGLS |
| | SPVTKSFNRGEC (SEQ ID NO: 93) |
| 5H12 | Heavy Chain (with wild type human IgG1 constant region) |
| VH5 (C33D*)/Vk4 | QVQLVQSGAEVKKPGASVKVSCKASGYSFTDYDINWVRQAPGQGLEWMG |
| | WIYPGSGNTRYSERFKGRVTITRDTSASTAYMELSSLRSEDTAVYYCARED |
| | YYPYHGMDYWGQGTLVTVSSASTKGPSVFPLAPSSKSTSGGTAALGCLVK |
| | DYFPEPVTVSWNSGALTSGVHTFPAVLQSSGLYSLSSVVTVPSSSLGTQTYIC |
| | NVNHKPSNTKVDKKVEPKSCDKTHTCPPCPAPELLGGPSVFLFPPKPKDTLM |
| | ISRTPEVTCVVVDVSHEDPEVKFNWYVDGVEVHNAKTKPREEQYNSTYRV |
| | VSVLTVLHQDWLNGKEYKCKVSNKALPAPIEKTISKAKGQPREPQVYTLPPS |
| | RDELTKNQVSLTCLVKGFYPSDIAVEWESNGQPENNYKTTPPVLDSDGSFFL |
| | YSKLTVDKSRWQQGNVFSCSVMHEALHNHYTQKSLSLSPGK (SEQ ID NO: |
| | 94) |
| | Light Chain (with kappa light chain constant region) |
| | DIVMTQSPDSLAVSLGERATINCRASESVDGYDNSFMHWYQQKPGQPPKL |
| | LIFRASNLESGVPDRFSGSGSGTDFTLTISSLQAEDVAVYYCQQSSEDPWTF |
| | GQGTKLEIKRTVAAPSVFIFPPSDEQLKSGTASVVCLLNNFYPREAKVQWKV |
| | DNALQSGNSQESVTEQDSKDSTYSLSSTLTLSKADYEKHKVYACEVTHQGL |
| | SSPVTKSFNRGEC (SEQ ID NO: 95) |
| 5H12 | Heavy Chain (with wild type human IgG1 constant region) |
| VH5 (C33Y*)/Vκ4 | QVQLVQSGAEVKKPGASVKVSCKASGYSFTDYYINWVRQAPGQGLEWMG |
| | WIYPGSGNTRYSERFKGRVTITRDTSASTAYMELSSLRSEDTAVYYCARED |
| | YYPYHGMDYWGQGTLVTVSSASTKGPSVFPLAPSSKSTSGGTAALGCLVK |
| | DYFPEPVTVSWNSGALTSGVHTFPAVLQSSGLYSLSSVVTVPSSSLGTQTYIC |
| | NVNHKPSNTKVDKKVEPKSCDKTHTCPPCPAPELLGGPSVFLFPPKPKDTLM |
| | ISRTPEVTCVVVDVSHEDPEVKFNWYVDGVEVHNAKTKPREEQYNSTYRV |
| | VSVLTVLHQDWLNGKEYKCKVSNKALPAPIEKTISKAKGQPREPQVYTLPPS |
| | RDELTKNQVSLTCLVKGFYPSDIAVEWESNGQPENNYKTTPPVLDSDGSFFL |
| | YSKLTVDKSRWQQGNVFSCSVMHEALHNHYTQKSLSLSPGK (SEQ ID NO: |
| | 92) |
| | Light Chain (with kappa light chain constant region) |
| | DIVMTQSPDSLAVSLGERATINCRASESVDGYDNSFMHWYQQKPGQPPKL |
| | LIFRASNLESGVPDRFSGSGSGTDFTLTISSLQAEDVAVYYCQQSSEDPWTF |
| | GQGTKLEIKRTVAAPSVFIFPPSDEQLKSGTASVVCLLNNFYPREAKVQWKV |
| | DNALQSGNSQESVTEQDSKDSTYSLSSTLTLSKADYEKHKVYACEVTHQGL |
| | SSPVTKSFNRGEC (SEQ ID NO: 95) |

*mutation positions are according to Kabat numbering of the respective VH sequences containing the mutations
**CDRs according to the Kabat numbering system are bolded; VH/VL sequences underlined

[0270] In some embodiments, the humanized anti-TfR1 antibody of the present disclosure comprises a heavy chain containing no more than 25 amino acid variations (e.g., no more than 25, 24, 23, 22, 21, 20, 19, 18, 17, 16, 15, 14, 13, 12, 11, 10, 9, 8, 7, 6, 5, 4, 3, 2, or 1 amino acid variation) as compared with the heavy chain as set forth in any one of SEQ ID NOs: 84, 86, 87, 88, 91, 92, and 94. Alternatively or in addition (e.g., in addition), the humanized anti-TfR1 antibody of the present disclosure comprises a light chain containing no more than 25 amino acid variations (e.g., no more than 25, 24, 23, 22, 21, 20, 19, 18, 17, 16, 15, 14, 13, 12, 11, 10, 9, 8, 7, 6, 5, 4, 3, 2, or 1 amino acid variation) as compared with the light chain as set forth in any one of SEQ ID NOs: 85, 89, 90, 93, and 95.

[0271] In some embodiments, the humanized anti-TfR1 antibody described herein comprises a heavy chain comprising an amino acid sequence that is at least 75% (e.g., 75%, 80%, 85%, 90%, 95%, 98%, or 99%) identical to any one of SEQ ID NOs: 84, 86, 87, 88, 91, 92, and 94. Alternatively or in addition (e.g., in addition), the humanized anti-TfR1 antibody described herein comprises a light chain comprising an amino acid sequence that is at least 75% (e.g., 75%, 80%, 85%, 90%, 95%, 98%, or 99%) identical to any one of SEQ ID NOs: 85, 89, 90, 93, and 95. In some embodiments, the anti-TfR1 antibody described herein comprises a heavy chain comprising the amino acid sequence of any one of SEQ ID NOs: 84, 86, 87, 88, 91, 92, and 94. Alternatively or in addition (e.g., in addition), the anti-TfR1 antibody described herein comprises a light chain comprising the amino acid sequence of any one of SEQ ID NOs: 85, 89, 90, 93, and 95.

[0272] In some embodiments, the humanized anti-TfR1 antibody of the present disclosure comprises a heavy chain comprising an amino acid sequence that is at least 80% (e.g., 80%, 85%, 90%, 95%, 98%, or 99%) identical to SEQ ID NO: 84, and/or (e.g., and) a light chain comprising an amino acid sequence that is at least 80% identical (e.g., 80%, 85%, 90%, 95%, 98%, or 99%) to SEQ ID NO: 85. In some embodiments, the humanized anti-TfR1 antibody of the present disclosure comprises a heavy chain comprising the amino acid sequence of SEQ ID NO: 84 and a light chain comprising the amino acid sequence of SEQ ID NO: 85.

[0273] In some embodiments, the humanized anti-TfR1 antibody of the present disclosure comprises a heavy chain comprising an amino acid sequence that is at least 80% (e.g., 80%, 85%, 90%, 95%, 98%, or 99%) identical to SEQ ID NO: 86, and/or (e.g., and) a light chain comprising an amino acid sequence that is at least 80% identical (e.g., 80%, 85%, 90%, 95%, 98%, or 99%) to SEQ ID NO: 85. In some embodiments, the humanized anti-TfR1 antibody of the present disclosure comprises a heavy chain comprising the amino acid sequence of SEQ ID NO: 86 and a light chain comprising the amino acid sequence of SEQ ID NO: 85.

[0274] In some embodiments, the humanized anti-TfR1 antibody of the present disclosure comprises a heavy chain comprising an amino acid sequence that is at least 80% (e.g., 80%, 85%, 90%, 95%, 98%, or 99%) identical to SEQ ID NO: 87, and/or (e.g., and) a light chain comprising an amino acid sequence that is at least 80% identical (e.g., 80%, 85%, 90%, 95%, 98%, or 99%) to SEQ ID NO: 85. In some embodiments, the humanized anti-TfR1 antibody of the present disclosure comprises a heavy chain comprising the amino acid sequence of SEQ ID NO: 87 and a light chain comprising the amino acid sequence of SEQ ID NO: 85.

[0275] In some embodiments, the humanized anti-TfR1 antibody of the present disclosure comprises a heavy chain comprising an amino acid sequence that is at least 80% (e.g., 80%, 85%, 90%, 95%, 98%, or 99%) identical to SEQ ID NO: 88, and/or (e.g., and) a light chain comprising an amino acid sequence that is at least 80% identical (e.g., 80%, 85%, 90%, 95%, 98%, or 99%) to SEQ ID NO: 89. In some embodiments, the humanized anti-TfR1 antibody of the present disclosure comprises a heavy chain comprising the amino acid sequence of SEQ ID NO: 88 and a light chain comprising the amino acid sequence of SEQ ID NO: 89.

[0276] In some embodiments, the humanized anti-TfR1 antibody of the present disclosure comprises a heavy chain comprising an amino acid sequence that is at least 80% (e.g., 80%, 85%, 90%, 95%, 98%, or 99%) identical to SEQ ID NO: 88, and/or (e.g., and) a light chain comprising an amino acid sequence that is at least 80% identical (e.g., 80%, 85%, 90%, 95%, 98%, or 99%) to SEQ ID NO: 90. In some embodiments, the humanized anti-TfR1 antibody of the present disclosure comprises a heavy chain comprising the amino acid sequence of SEQ ID NO: 88 and a light chain comprising the amino acid sequence of SEQ ID NO: 90.

[0277] In some embodiments, the humanized anti-TfR1 antibody of the present disclosure comprises a heavy chain comprising an amino acid sequence that is at least 80% (e.g., 80%, 85%, 90%, 95%, 98%, or 99%) identical to SEQ ID NO: 91, and/or (e.g., and) a light chain comprising an amino acid sequence that is at least 80% identical (e.g., 80%, 85%, 90%, 95%, 98%, or 99%) to SEQ ID NO: 89. In some embodiments, the humanized anti-TfR1 antibody of the present disclosure comprises a heavy chain comprising the amino acid sequence of SEQ ID NO: 91 and a light chain comprising the amino acid sequence of SEQ ID NO: 89.

[0278] In some embodiments, the humanized anti-TfR1 antibody of the present disclosure comprises a heavy chain comprising an amino acid sequence that is at least 80% (e.g., 80%, 85%, 90%, 95%, 98%, or 99%) identical to SEQ ID NO: 91, and/or (e.g., and) a light chain comprising an amino acid sequence that is at least 80% identical (e.g., 80%, 85%, 90%, 95%, 98%, or 99%) to SEQ ID NO: 90. In some embodiments, the humanized anti-TfR1 antibody of the present disclosure comprises a heavy chain comprising the amino acid sequence of SEQ ID NO: 91 and a light chain comprising the amino acid sequence of SEQ ID NO: 90.

[0279] In some embodiments, the humanized anti-TfR1 antibody of the present disclosure comprises a heavy chain comprising an amino acid sequence that is at least 80% (e.g., 80%, 85%, 90%, 95%, 98%, or 99%) identical to SEQ ID NO: 92, and/or (e.g., and) a light chain comprising an amino acid sequence that is at least 80% identical (e.g., 80%, 85%, 90%, 95%, 98%, or 99%) to SEQ ID NO: 93. In some embodiments, the humanized anti-TfR1 antibody of the present disclosure comprises a heavy chain comprising the amino acid sequence of SEQ ID NO: 92 and a light chain comprising the amino acid sequence of SEQ ID NO: 93.

[0280] In some embodiments, the humanized anti-TfR1 antibody of the present disclosure comprises a heavy chain comprising an amino acid sequence that is at least 80% (e.g., 80%, 85%, 90%, 95%, 98%, or 99%) identical to SEQ ID NO: 94, and/or (e.g., and) a light chain comprising an amino acid sequence that is at least 80% identical (e.g., 80%, 85%, 90%, 95%, 98%, or 99%) to SEQ ID NO: 95. In some embodiments, the humanized anti-TfR1 antibody of the present disclosure comprises a heavy chain comprising the amino acid sequence of SEQ ID NO: 94 and a light chain comprising the amino acid sequence of SEQ ID NO: 95.

[0281] In some embodiments, the humanized anti-TfR1 antibody of the present disclosure comprises a heavy chain comprising an amino acid sequence that is at least 80% (e.g., 80%, 85%, 90%, 95%, 98%, or 99%) identical to SEQ ID NO: 92, and/or (e.g., and) a light chain comprising an amino acid sequence that is at least 80% identical (e.g., 80%, 85%, 90%, 95%, 98%, or 99%) to SEQ ID NO: 95. In some embodiments, the humanized anti-TfR1 antibody of the present disclosure comprises a heavy chain comprising the amino acid sequence of SEQ ID NO: 92 and a light chain comprising the amino acid sequence of SEQ ID NO: 95.

[0282] In some embodiments, the anti-TfR1 antibody is a Fab fragment, Fab′ fragment, or F(ab′)₂ fragment of an intact antibody (full-length antibody). Antigen binding fragment of an intact antibody (full-length antibody) can be prepared via routine methods (e.g., recombinantly or by digesting the heavy chain constant region of a full-length IgG using an enzyme such as papain). For example, F(ab′)₂ fragments can be produced by pepsin or papain digestion of an antibody molecule, and Fab′ fragments that can be generated by reducing the disulfide bridges of F(ab′)₂ fragments. In some embodiments, a heavy chain constant region in a Fab fragment of the anti-TfR1 antibody described herein comprises the amino acid sequence of:

(SEQ ID NO: 96)
ASTKGPSVFPLAPSSKSTSGGTAALGCLVKDYFPEPVTVSWNSGALTSG
VHTFPAVLQSSGLYSLSSVVTVPSSSLGTQTYICNVNHKPSNTKVDKKV
EPKSCDKTHT

[0283] In some embodiments, the humanized anti-TfR1 antibody described herein comprises a heavy chain comprising any one of the VH as listed in Table 3 or any variants thereof and a heavy chain constant region that is at least 80%, at least 85%, at least 90%, at least 95%, or at least 99% identical to SEQ ID NO: 96. In some embodiments, the humanized anti-TfR1 antibody described herein comprises a heavy chain comprising any one of the VH as listed in Table 3 or any variants thereof and a heavy chain constant region that contains no more than 25 amino acid variations (e.g., no more than 25, 24, 23, 22, 21, 20, 19, 18, 17, 16, 15, 14, 13, 12, 11, 10, 9, 8, 7, 6, 5, 4, 3, 2, or 1 amino acid variation) as compared with SEQ ID NO: 96. In some embodiments, the humanized anti-TfR1 antibody described herein comprises a heavy chain comprising any one of the VH as listed in Table 3 or any variants thereof and a heavy chain constant region as set forth in SEQ ID NO: 96.

[0284] In some embodiments, the humanized anti-TfR1 antibody described herein comprises a light chain comprising any one of the VL as listed in Table 3 or any variants thereof and a light chain constant region that is at least 80%, at least 85%, at least 90%, at least 95%, or at least 99% identical to SEQ ID NO: 83. In some embodiments, the humanized anti-TfR1 antibody described herein comprises a light chain comprising any one of the VL as listed in Table 3 or any variants thereof and a light chain constant region contains no more than 25 amino acid variations (e.g., no more than 25, 24, 23, 22, 21, 20, 19, 18, 17, 16, 15, 14, 13, 12, 11, 10, 9, 8, 7, 6, 5, 4, 3, 2, or 1 amino acid variation) as compared with SEQ ID NO: 83. In some embodiments, the humanized anti-TfR1 antibody described herein comprises a light chain comprising any one of the VL as listed in Table 3 or any variants thereof and a light chain constant region set forth in SEQ ID NO: 83.

[0285] Examples of Fab heavy chain and light chain amino acid sequences of the anti-TfR1 antibodies described are provided in Table 5 below.

TABLE 5
Heavy chain and light chain sequences of examples of humanized anti-TfRl Fabs

| Antibody | Fab Heavy Chain/Light Chain Sequences** |
|---|---|
| 3A4 | Heavy Chain (with partial human IgG1 constant region) |
| VH3 (N54T*)/Vκ4 | EVQLVQSGSELKKPGASVKVSCTASGFNIKDDYMYWVRQPPGKGLEWIGW |
| | IDPETGDTEYASKFQDRVTVTADTSTNTAYMELSSLRSEDTAVYYCTLWL |
| | RRGLDYWGQGTLVTVSSASTKGPSVFPLAPSSKSTSGGTAALGCLVKDYFP |
| | EPVTVSWNSGALTSGVHTFPAVLQSSGLYSLSSVVTVPSSSLGTQTYICNVN |
| | HKPSNTKVDKKVEPKSCDKTHT (SEQ ID NO: 97) |
| | Light Chain (with kappa light chain constant region) |
| | DIVMTQSPLSLPVTPGEPASISCRSSKSLLHSNGYTYLFWFQQRPGQSPRLLI |
| | YRMSNLASGVPDRFSGSGSGTDFTLKISRVEAEDVGVYYCMQHLEYPFTF |
| | GGGTKVEIKRTVAAPSVFIFPPSDEQLKSGTASVVCLLNNFYPREAKVQWKV |
| | DNALQSGNSQESVTEQDSKDSTYSLSSTLTLSKADYEKHKVYACEVTHQGL |
| | SSPVTKSFNRGEC (SEQ ID NO: 85) |
| 3A4 | Heavy Chain (with partial human IgG1 constant region) |
| VH3 (N54S*)/Vκ4 | EVQLVQSGSELKKPGASVKVSCTASGFNIKDDYMYWVRQPPGKGLEWIGW |
| | IDPESGDTEYASKFQDRVTVTADTSTNTAYMELSSLRSEDTAVYYCTLWL |
| | RRGLDYWGQGTLVTVSSASTKGPSVFPLAPSSKSTSGGTAALGCLVKDYFP |
| | EPVTVSWNSGALTSGVHTFPAVLQSSGLYSLSSVVTVPSSSLGTQTYICNVN |
| | HKPSNTKVDKKVEPKSCDKTHT (SEQ ID NO: 98) |
| | Light Chain (with kappa light chain constant region) |
| | DIVMTQSPLSLPVTPGEPASISCRSSKSLLHSNGYTYLFWFQQRPGQSPRLLI |
| | YRMSNLASGVPDRFSGSGSGTDFTLKISRVEAEDVGVYYCMQHLEYPFTF |
| | GGGTKVEIKRTVAAPSVFIFPPSDEQLKSGTASVVCLLNNFYPREAKVQWKV |
| | DNALQSGNSQESVTEQDSKDSTYSLSSTLTLSKADYEKHKVYACEVTHQGL |
| | SSPVTKSFNRGEC (SEQ ID NO: 85) |
| 3A4 | Heavy Chain (with partial human IgG1 constant region) |
| VH3/Vκ4 | EVQLVQSGSELKKPGASVKVSCTASGFNIKDDYMYWVRQPPGKGLEWIGW |
| | IDPENGDTEYASKFQDRVTVTADTSTNTAYMELSSLRSEDTAVYYCTLWL |
| | RRGLDYWGQGTLVTVSSASTKGPSVFPLAPSSKSTSGGTAALGCLVKDYFP |
| | EPVTVSWNSGALTSGVHTFPAVLQSSGLYSLSSVVTVPSSSLGTQTYICNVN |
| | HKPSNTKVDKKVEPKSCDKTHT (SEQ ID NO: 99) |
| | Light Chain (with kappa light chain constant region) |
| | DIVMTQSPLSLPVTPGEPASISCRSSKSLLHSNGYTYLFWFQQRPGQSPRLLI |
| | YRMSNLASGVPDRFSGSGSGTDFTLKISRVEAEDVGVYYCMQHLEYPFTF |
| | GGGTKVEIKRTVAAPSVFIFPPSDEQLKSGTASVVCLLNNFYPREAKVQWKV |
| | DNALQSGNSQESVTEQDSKDSTYSLSSTLTLSKADYEKHKVYACEVTHQGL |
| | SSPVTKSFNRGEC (SEQ ID NO: 85) |
| 3M12 | Heavy Chain (with partial human IgG1 constant region) |
| VH3/Vκ2 | QVQLQESGPGLVKPSQTLSLTCSVTGYSITSGYYWNWIRQPPGKGLEWMGY |
| | ITFDGANNYNPSLKNRVSISRDTSKNQFSLKLSSVTAEDTATYYCTRSSYDY |
| | DVLDYWGQGTTVTVSSASTKGPSVFPLAPSSKSTSGGTAALGCLVKDYFPE |
| | PVTVSWNSGALTSGVHTFPAVLQSSGLYSLSSVVTVPSSSLGTQTYICNVNH |
| | KPSNTKVDKKVEPKSCDKTHT (SEQ ID NO: 100) |
| | Light Chain (with kappa light chain constant region) |
| | DIQMTQSPSSLSASVGDRVTITCRASQDISNFLNWYQQKPGQPVKLLIYYTS |
| | RLHSGVPSRFSGSGSGTDFTLTISSLQPEDFATYFCQQGHTLPYTFGQGTKL |
| | EIKRTVAAPSVFIFPPSDEQLKSGTASVVCLLNNFYPREAKVQWKVDNALQS |
| | GNSQESVTEQDSKDSTYSLSSTLTLSKADYEKHKVYACEVTHQGLSSPVTKS |
| | FNRGEC (SEQ ID NO: 89) |
| 3M12 | Heavy Chain (with partial human IgG1 constant region) |
| VH3/Vκ3 | QVQLQESGPGLVKPSQTLSLTCSVTGYSITSGYYWNWIRQPPGKGLEWMGY |
| | ITFDGANNYNPSLKNRVSISRDTSKNQFSLKLSSVTAEDTATYYCTRSSYDY |
| | DVLDYWGQGTTVTVSSASTKGPSVFPLAPSSKSTSGGTAALGCLVKDYFPE |
| | PVTVSWNSGALTSGVHTFPAVLQSSGLYSLSSVVTVPSSSLGTQTYICNVNH |
| | KPSNTKVDKKVEPKSCDKTHT (SEQ ID NO: 100) |
| | Light Chain (with kappa light chain constant region) |
| | DIQMTQSPSSLSASVGDRVTITCRASQDISNFLNWYQQKPGQPVKLLIYYTS |
| | RLHSGVPSRFSGSGSGTDFTLTISSLQPEDFATYYCQQGHTLPYTFGQGTKL |
| | EIKRTVAAPSVFIFPPSDEQLKSGTASVVCLLNNFYPREAKVQWKVDNALQS |
| | GNSQESVTEQDSKDSTYSLSSTLTLSKADYEKHKVYACEVTHQGLSSPVTKS |
| | FNRGEC (SEQ ID NO: 90) |
| 3M12 | Heavy Chain (with partial human IgG1 constant region) |
| VH4/Vκ2 | QVQLQESGPGLVKPSQTLSLTCTVTGYSITSGYYWNWIRQPPGKGLEWIGYI |
| | TFDGANNYNPSLKNRVSISRDTSKNQFSLKLSSVTAEDTATYYCTRSSYDY |
| | DVLDYWGQGTTVTVSSASTKGPSVFPLAPSSKSTSGGTAALGCLVKDYFPE |
| | PVTVSWNSGALTSGVHTFPAVLQSSGLYSLSSVVTVPSSSLGTQTYICNVNH |
| | KPSNTKVDKKVEPKSCDKTHT (SEQ ID NO: 101) |
| | Light Chain (with kappa light chain constant region) |
| | DIQMTQSPSSLSASVGDRVTITCRASQDISNFLNWYQQKPGQPVKLLIYYTS |
| | RLHSGVPSRFSGSGSGTDFTLTISSLQPEDFATYFCQQGHTLPYTFGQGTKL |
| | EIKRTVAAPSVFIFPPSDEQLKSGTASVVCLLNNFYPREAKVQWKVDNALQS |
| | GNSQESVTEQDSKDSTYSLSSTLTLSKADYEKHKVYACEVTHQGLSSPVTKS |
| | FNRGEC (SEQ ID NO: 89) |
| 3M12 | Heavy Chain (with partial human IgG1 constant region) |
| VH4/Vκ3 | QVQLQESGPGLVKPSQTLSLTCTVTGYSITSGYYWNWIRQPPGKGLEWIGYI |
| | TFDGANNYNPSLKNRVSISRDTSKNQFSLKLSSVTAEDTATYYCTRSSYDY |
| | DVLDYWGQGTTVTVSSASTKGPSVFPLAPSSKSTSGGTAALGCLVKDYFPE |
| | PVTVSWNSGALTSGVHTFPAVLQSSGLYSLSSVVTVPSSSLGTQTYICNVNH |
| | KPSNTKVDKKVEPKSCDKTHT (SEQ ID NO: 101) |
| | Light Chain (with kappa light chain constant region) |
| | DIQMTQSPSSLSASVGDRVTITCRASQDISNFLNWYQQKPGQPVKLLIYYTS |
| | RLHSGVPSRFSGSGSGTDFTLTISSLQPEDFATYYCQQGHTLPYTFGQGTKL |
| | EIKRTVAAPSVFIFPPSDEQLKSGTASVVCLLNNFYPREAKVQWKVDNALQS |
| | GNSQESVTEQDSKDSTYSLSSTLTLSKADYEKHKVYACEVTHQGLSSPVTKS |
| | FNRGEC (SEQ ID NO: 90) |
| 5H12 | Heavy Chain (with partial human IgG1 constant region) |
| VH5 (C33Y*)/Vκ3 | QVQLVQSGAEVKKPGASVKVSCKASGYSFTDYYINWVRQAPGQGLEWMG |
| | WIYPGSGNTRYSERFKGRVTITRDTSASTAYMELSSLRSEDTAVYYCARED |
| | YYPYHGMDYWGQGTLVTVSSASTKGPSVFPLAPSSKSTSGGTAALGCLVK |
| | DYFPEPVTVSWNSGALTSGVHTFPAVLQSSGLYSLSSVVTVPSSSLGTQTYIC |
| | NVNHKPSNTKVDKKVEPKSCDKTHT (SEQ ID NO: 102) |
| | Light Chain (with kappa light chain constant region) |
| | DIVLTQSPDSLAVSLGERATINCRASESVDGYDNSFMHWYQQKPGQPPKLL |
| | IFRASNLESGVPDRFSGSGSRTDFTLTISSLQAEDVAVYYCQQSSEDPWTFG |
| | QGTKLEIKRTVAAPSVFIFPPSDEQLKSGTASVVCLLNNFYPREAKVQWKVD |
| | NALQSGNSQESVTEQDSKDSTYSLSSTLTLSKADYEKHKVYACEVTHQGLS |
| | SPVTKSFNRGEC (SEQ ID NO: 93) |
| 5H12 | Heavy Chain (with partial human IgG1 constant region) |
| VH5 (C33D*)/Vκ4 | QVQLVQSGAEVKKPGASVKVSCKASGYSFTDYDINWVRQAPGQGLEWMG |
| | WIYPGSGNTRYSERFKGRVTITRDTSASTAYMELSSLRSEDTAVYYCARED |
| | YYPYHGMDYWGQGTLVTVSSASTKGPSVFPLAPSSKSTSGGTAALGCLVK |
| | DYFPEPVTVSWNSGALTSGVHTFPAVLQSSGLYSLSSVVTVPSSSLGTQTYIC |
| | NVNHKPSNTKVDKKVEPKSCDKTHT (SEQ ID NO: 103) |
| | Light Chain (with kappa light chain constant region) |
| | DIVMTQSPDSLAVSLGERATINCRASESVDGYDNSFMHWYQQKPGQPPKL |
| | LIFRASNLESGVPDRFSGSGSGTDFTLTISSLQAEDVAVYYCQQSSEDPWTF |
| | GQGTKLEIKRTVAAPSVFIFPPSDEQLKSGTASVVCLLNNFYPREAKVQWKV |
| | DNALQSGNSQESVTEQDSKDSTYSLSSTLTLSKADYEKHKVYACEVTHQGL |
| | SSPVTKSFNRGEC (SEQ ID NO: 95) |
| 5H12 | Heavy Chain (with partial human IgG1 constant region) |
| VH5 (C33Y*)/Vκ4 | QVQLVQSGAEVKKPGASVKVSCKASGYSFTDYYINWVRQAPGQGLEWMG |
| | WIYPGSGNTRYSERFKGRVTITRDTSASTAYMELSSLRSEDTAVYYCARED |
| | YYPYHGMDYWGQGTLVTVSSASTKGPSVFPLAPSSKSTSGGTAALGCLVK |
| | DYFPEPVTVSWNSGALTSGVHTFPAVLQSSGLYSLSSVVTVPSSSLGTQTYIC |
| | NVNHKPSNTKVDKKVEPKSCDKTHT (SEQ ID NO: 102) |
| | Light Chain (with kappa light chain constant region) |
| | DIVMTQSPDSLAVSLGERATINCRASESVDGYDNSFMHWYQQKPGQPPKL |
| | LIFRASNLESGVPDRFSGSGSGTDFTLTISSLQAEDVAVYYCQQSSEDPWTF |
| | GQGTKLEIKRTVAAPSVFIFPPSDEQLKSGTASVVCLLNNFYPREAKVQWKV |
| | DNALQSGNSQESVTEQDSKDSTYSLSSTLTLSKADYEKHKVYACEVTHQGL |
| | SSPVTKSFNRGEC (SEQ ID NO: 95) |

*mutation positions are according to Kabat numbering of the respective VH sequences containing the mutations
**CDRs according to the Kabat numbering system are bolded; VH/VL sequences underlined

[0286] In some embodiments, the humanized anti-TfR1 antibody of the present disclosure comprises a heavy chain containing no more than 25 amino acid variations (e.g., no more than 25, 24, 23, 22, 21, 20, 19, 18, 17, 16, 15, 14, 13, 12, 11, 10, 9, 8, 7, 6, 5, 4, 3, 2, or 1 amino acid variation) as compared with the heavy chain as set forth in any one of SEQ ID NOs: 97-103. Alternatively or in addition (e.g., in addition), the humanized anti-TfR1 antibody of the present disclosure comprises a light chain containing no more than 25 amino acid variations (e.g., no more than 25, 24, 23, 22, 21, 20, 19, 18, 17, 16, 15, 14, 13, 12, 11, 10, 9, 8, 7, 6, 5, 4, 3, 2, or 1 amino acid variation) as compared with the light chain as set forth in any one of SEQ ID NOs: 85, 89, 90, 93, and 95.

[0287] In some embodiments, the humanized anti-TfR1 antibody described herein comprises a heavy chain comprising an amino acid sequence that is at least 75% (e.g., 75%, 80%, 85%, 90%, 95%, 98%, or 99%) identical to any one of SEQ ID NOs: 97-103. Alternatively or in addition (e.g., in addition), the humanized anti-TfR1 antibody described herein comprises a light chain comprising an amino acid sequence that is at least 75% (e.g., 75%, 80%, 85%, 90%, 95%, 98%, or 99%) identical to any one of SEQ ID NOs: 85, 89, 90, 93, and 95. In some embodiments, the anti-TfR1 antibody described herein comprises a heavy chain comprising the amino acid sequence of any one of SEQ ID NOs: 97-103. Alternatively or in addition (e.g., in addition), the anti-TfR1 antibody described herein comprises a light chain comprising the amino acid sequence of any one of SEQ ID NOs: 85, 89, 90, 93, and 95.

[0288] In some embodiments, the humanized anti-TfR1 antibody of the present disclosure comprises a heavy chain comprising an amino acid sequence that is at least 80% (e.g., 80%, 85%, 90%, 95%, 98%, or 99%) identical to SEQ ID NO: 97, and/or (e.g., and) a light chain comprising an amino acid sequence that is at least 80% identical (e.g., 80%, 85%, 90%, 95%, 98%, or 99%) to SEQ ID NO: 85. In some embodiments, the humanized anti-TfR1 antibody of the present disclosure comprises a heavy chain comprising the amino acid sequence of SEQ ID NO: 97 and a light chain comprising the amino acid sequence of SEQ ID NO: 85.

[0289] In some embodiments, the humanized anti-TfR1 antibody of the present disclosure comprises a heavy chain comprising an amino acid sequence that is at least 80% (e.g., 80%, 85%, 90%, 95%, 98%, or 99%) identical to SEQ ID NO: 98, and/or (e.g., and) a light chain comprising an amino acid sequence that is at least 80% identical (e.g., 80%, 85%, 90%, 95%, 98%, or 99%) to SEQ ID NO: 85. In some embodiments, the humanized anti-TfR1 antibody of the present disclosure comprises a heavy chain comprising the amino acid sequence of SEQ ID NO: 98 and a light chain comprising the amino acid sequence of SEQ ID NO: 85.

[0290] In some embodiments, the humanized anti-TfR1 antibody of the present disclosure comprises a heavy chain comprising an amino acid sequence that is at least 80% (e.g., 80%, 85%, 90%, 95%, 98%, or 99%) identical to SEQ ID NO: 99, and/or (e.g., and) a light chain comprising an amino acid sequence that is at least 80% identical (e.g., 80%, 85%, 90%, 95%, 98%, or 99%) to SEQ ID NO: 85. In some embodiments, the humanized anti-TfR1 antibody of the present disclosure comprises a heavy chain comprising the amino acid sequence of SEQ ID NO: 99 and a light chain comprising the amino acid sequence of SEQ ID NO: 85.

[0291] In some embodiments, the humanized anti-TfR1 antibody of the present disclosure comprises a heavy chain comprising an amino acid sequence that is at least 80% (e.g., 80%, 85%, 90%, 95%, 98%, or 99%) identical to SEQ ID NO: 100, and/or (e.g., and) a light chain comprising an amino acid sequence that is at least 80% identical (e.g., 80%, 85%, 90%, 95%, 98%, or 99%) to SEQ ID NO: 89. In some embodiments, the humanized anti-TfR1 antibody of the present disclosure comprises a heavy chain comprising the amino acid sequence of SEQ ID NO: 100 and a light chain comprising the amino acid sequence of SEQ ID NO: 89.

[0292] In some embodiments, the humanized anti-TfR1 antibody of the present disclosure comprises a heavy chain comprising an amino acid sequence that is at least 80% (e.g., 80%, 85%, 90%, 95%, 98%, or 99%) identical to SEQ ID NO: 100, and/or (e.g., and) a light chain comprising an amino acid sequence that is at least 80% identical (e.g., 80%, 85%, 90%, 95%, 98%, or 99%) to SEQ ID NO: 90. In some embodiments, the humanized anti-TfR1 antibody of the present disclosure comprises a heavy chain comprising the amino acid sequence of SEQ ID NO: 100 and a light chain comprising the amino acid sequence of SEQ ID NO: 90.

[0293] In some embodiments, the humanized anti-TfR1 antibody of the present disclosure comprises a heavy chain comprising an amino acid sequence that is at least 80% (e.g., 80%, 85%, 90%, 95%, 98%, or 99%) identical to SEQ ID NO: 101, and/or (e.g., and) a light chain comprising an amino acid sequence that is at least 80% identical (e.g., 80%, 85%, 90%, 95%, 98%, or 99%) to SEQ ID NO: 89. In some embodiments, the humanized anti-TfR1 antibody of the present disclosure comprises a heavy chain comprising the amino acid sequence of SEQ ID NO: 101 and a light chain comprising the amino acid sequence of SEQ ID NO: 89.

[0294] In some embodiments, the humanized anti-TfR1 antibody of the present disclosure comprises a heavy chain comprising an amino acid sequence that is at least 80% (e.g., 80%, 85%, 90%, 95%, 98%, or 99%) identical to SEQ ID NO: 101, and/or (e.g., and) a light chain comprising an amino acid sequence that is at least 80% identical (e.g., 80%, 85%, 90%, 95%, 98%, or 99%) to SEQ ID NO: 90. In some embodiments, the humanized anti-TfR1 antibody of the present disclosure comprises a heavy chain comprising the amino acid sequence of SEQ ID NO: 101 and a light chain comprising the amino acid sequence of SEQ ID NO: 90.

[0295] In some embodiments, the humanized anti-TfR1 antibody of the present disclosure comprises a heavy chain comprising an amino acid sequence that is at least 80% (e.g., 80%, 85%, 90%, 95%, 98%, or 99%) identical to SEQ ID NO: 102, and/or (e.g., and) a light chain comprising an amino acid sequence that is at least 80% identical (e.g., 80%, 85%, 90%, 95%, 98%, or 99%) to SEQ ID NO: 93. In some embodiments, the humanized anti-TfR1 antibody of the present disclosure comprises a heavy chain comprising the amino acid sequence of SEQ ID NO: 102 and a light chain comprising the amino acid sequence of SEQ ID NO: 93.

[0296] In some embodiments, the humanized anti-TfR1 antibody of the present disclosure comprises a heavy chain comprising an amino acid sequence that is at least 80% (e.g., 80%, 85%, 90%, 95%, 98%, or 99%) identical to SEQ ID NO: 103, and/or (e.g., and) a light chain comprising an amino acid sequence that is at least 80% identical (e.g., 80%, 85%, 90%, 95%, 98%, or 99%) to SEQ ID NO: 95. In some embodiments, the humanized anti-TfR1 antibody of the present disclosure comprises a heavy chain comprising the amino acid sequence of SEQ ID NO: 103 and a light chain comprising the amino acid sequence of SEQ ID NO: 95.

[0297] In some embodiments, the humanized anti-TfR1 antibody of the present disclosure comprises a heavy chain comprising an amino acid sequence that is at least 80% (e.g., 80%, 85%, 90%, 95%, 98%, or 99%) identical to SEQ ID NO: 102, and/or (e.g., and) a light chain comprising an amino acid sequence that is at least 80% identical (e.g., 80%, 85%, 90%, 95%, 98%, or 99%) to SEQ ID NO: 95. In some embodiments, the humanized anti-TfR1 antibody of the present disclosure comprises a heavy chain comprising the amino acid sequence of SEQ ID NO: 102 and a light chain comprising the amino acid sequence of SEQ ID NO: 95.

[0298] In some embodiments, the humanized anti-TfR1 receptor antibodies described herein can be in any antibody form, including, but not limited to, intact (i.e., full-length) antibodies, antigen-binding fragments thereof (such as Fab, Fab′, F(ab′)2, Fv), single chain antibodies, bi-specific antibodies, or nanobodies. In some embodiments, humanized the anti-TfR1 antibody described herein is a scFv. In some embodiments, the humanized anti-TfR1 antibody described herein is a scFv-Fab (e.g., scFv fused to a portion of a constant region). In some embodiments, the anti-TfR1 receptor antibody described herein is a scFv fused to a constant region (e.g., human IgG1 constant region as set forth in SEQ ID NO: 81 or SEQ ID NO: 82, or a portion thereof such as the Fc portion) at either the N-terminus of C-terminus.

[0299] In some embodiments, conservative mutations can be introduced into antibody sequences (e.g., CDRs or framework sequences) at positions where the residues are not likely to be involved in interacting with a target antigen (e.g., transferrin receptor), for example, as determined based on a crystal structure. In some embodiments, one, two or more mutations (e.g., amino acid substitutions) are introduced into the Fc region of an anti-TfR1 antibody described herein (e.g., in a CH2 domain (residues 231-340 of human IgG1) and/or (e.g., and) CH3 domain (residues 341-447 of human IgG1) and/or (e.g., and) the hinge region, with numbering according to the Kabat numbering system (e.g., the EU index in Kabat)) to alter one or more functional properties of the antibody, such as serum half-life, complement fixation, Fc receptor binding and/or (e.g., and) antigen-dependent cellular cytotoxicity.

[0300] In some embodiments, one, two or more mutations (e.g., amino acid substitutions) are introduced into the hinge region of the Fc region (CH1 domain) such that the number of cysteine residues in the hinge region are altered (e.g., increased or decreased) as described in, e.g., U.S. Pat. No. 5,677,425. The number of cysteine residues in the hinge region of the CH1 domain can be altered to, e.g., facilitate assembly of the light and heavy chains, or to alter (e.g., increase or decrease) the stability of the antibody or to facilitate linker conjugation.

[0301] In some embodiments, one, two or more mutations (e.g., amino acid substitutions) are introduced into the Fc region of a muscle-targeting antibody described herein (e.g., in a CH2 domain (residues 231-340 of human IgG1) and/or (e.g., and) CH3 domain (residues 341-447 of human IgG1) and/or (e.g., and) the hinge region, with numbering according to the Kabat numbering system (e.g., the EU index in Kabat)) to increase or decrease the affinity of the antibody for an Fc receptor (e.g., an activated Fc receptor) on the surface of an effector cell. Mutations in the Fc region of an antibody that decrease or increase the affinity of an antibody for an Fc receptor and techniques for introducing such mutations into the Fc receptor or fragment thereof are known to one of skill in the art. Examples of mutations in the Fc receptor of an antibody that can be made to alter the affinity of the antibody for an Fc receptor are described in, e.g., Smith P et al., (2012) PNAS 109: 6181-6186, U.S. Pat. No. 6,737,056, and International Publication Nos. WO 02/060919; WO 98/23289; and WO 97/34631, which are incorporated herein by reference.

[0302] In some embodiments, one, two or more amino acid mutations (i.e., substitutions, insertions or deletions) are introduced into an IgG constant domain, or FcRn-binding fragment thereof (preferably an Fc or hinge-Fc domain fragment) to alter (e.g., decrease or increase) half-life of the antibody in vivo. See, e.g., International Publication Nos. WO 02/060919; WO 98/23289; and WO 97/34631; and U.S. Pat. Nos. 5,869,046, 6,121,022, 6,277,375 and 6,165,745 for examples of mutations that will alter (e.g., decrease or increase) the half-life of an antibody in vivo.

[0303] In some embodiments, one, two or more amino acid mutations (i.e., substitutions, insertions or deletions) are introduced into an IgG constant domain, or FcRn-binding fragment thereof (preferably an Fc or hinge-Fc domain fragment) to decrease the half-life of the anti-anti-TfR1 antibody in vivo. In some embodiments, one, two or more amino acid mutations (i.e., substitutions, insertions or deletions) are introduced into an IgG constant domain, or FcRn-binding fragment thereof (preferably an Fc or hinge-Fc domain fragment) to increase the half-life of the antibody in vivo. In some embodiments, the antibodies can have one or more amino acid mutations (e.g., substitutions) in the second constant (CH2) domain (residues 231-340 of human IgG1) and/or (e.g., and) the third constant (CH3) domain (residues 341-447 of human IgG1), with numbering according to the EU index in Kabat (Kabat E A et al., (1991) supra). In some embodiments, the constant region of the IgG1 of an antibody described herein comprises a methionine (M) to tyrosine (Y) substitution in position 252, a serine (S) to threonine (T) substitution in position 254, and a threonine (T) to glutamic acid (E) substitution in position 256, numbered according to the EU index as in Kabat. See U.S. Pat. No. 7,658,921, which is incorporated herein by reference. This type of mutant IgG, referred to as “YTE mutant” has been shown to display fourfold increased half-life as compared to wild-type versions of the same antibody (see Dall'Acqua W F et al., (2006) J Biol Chem 281: 23514-24). In some embodiments, an antibody comprises an IgG constant domain comprising one, two, three or more amino acid substitutions of amino acid residues at positions 251-257, 285-290, 308-314, 385-389, and 428-436, numbered according to the EU index as in Kabat.

[0304] In some embodiments, one, two or more amino acid substitutions are introduced into an IgG constant domain Fc region to alter the effector function(s) of the anti-anti-TfR1 antibody. The effector ligand to which affinity is altered can be, for example, an Fc receptor or the C1 component of complement. This approach is described in further detail in U.S. Pat. Nos. 5,624,821 and 5,648,260. In some embodiments, the deletion or inactivation (through point mutations or other means) of a constant region domain can reduce Fc receptor binding of the circulating antibody thereby increasing tumor localization. See, e.g., U.S. Pat. Nos. 5,585,097 and 8,591,886 for a description of mutations that delete or inactivate the constant domain and thereby increase tumor localization. In some embodiments, one or more amino acid substitutions may be introduced into the Fc region of an antibody described herein to remove potential glycosylation sites on Fc region, which may reduce Fc receptor binding (see, e.g., Shields R L et al., (2001) J Biol Chem 276: 6591-604).

[0305] In some embodiments, one or more amino in the constant region of an anti-TfR1 antibody described herein can be replaced with a different amino acid residue such that the antibody has altered C1q binding and/or (e.g., and) reduced or abolished complement dependent cytotoxicity (CDC). This approach is described in further detail in U.S. Pat. No. 6,194,551 (Idusogie et al). In some embodiments, one or more amino acid residues in the N-terminal region of the CH2 domain of an antibody described herein are altered to thereby alter the ability of the antibody to fix complement. This approach is described further in International Publication No. WO 94/29351. In some embodiments, the Fc region of an antibody described herein is modified to increase the ability of the antibody to mediate antibody dependent cellular cytotoxicity (ADCC) and/or (e.g., and) to increase the affinity of the antibody for an Fc receptor. This approach is described further in International Publication No. WO 00/42072.

[0306] In some embodiments, the heavy and/or (e.g., and) light chain variable domain(s) sequence(s) of the antibodies provided herein can be used to generate, for example, CDR-grafted, chimeric, humanized, or composite human antibodies or antigen-binding fragments, as described elsewhere herein. As understood by one of ordinary skill in the art, any variant, CDR-grafted, chimeric, humanized, or composite antibodies derived from any of the antibodies provided herein may be useful in the compositions and methods described herein and will maintain the ability to specifically bind transferrin receptor, such that the variant, CDR-grafted, chimeric, humanized, or composite antibody has at least 50%, at least 60%, at least 70%, at least 80%, at least 90%, at least 95% or more binding to transferrin receptor relative to the original antibody from which it is derived.

[0307] In some embodiments, the antibodies provided herein comprise mutations that confer desirable properties to the antibodies. For example, to avoid potential complications due to Fab-arm exchange, which is known to occur with native IgG4 mAbs, the antibodies provided herein may comprise a stabilizing ‘Adair’ mutation (Angal S., et al., “A single amino acid substitution abolishes the heterogeneity of chimeric mouse/human (IgG4) antibody,” Mol Immunol 30, 105-108; 1993), where serine 228 (EU numbering; residue 241 Kabat numbering) is converted to proline resulting in an IgG1-like hinge sequence. Accordingly, any of the antibodies may include a stabilizing ‘Adair’ mutation.

[0308] In some embodiments, an antibody is modified, e.g., modified via glycosylation, phosphorylation, sumoylation, and/or (e.g., and) methylation. In some embodiments, an antibody is a glycosylated antibody, which is conjugated to one or more sugar or carbohydrate molecules. In some embodiments, the one or more sugar or carbohydrate molecule are conjugated to the antibody via N-glycosylation, O-glycosylation, C-glycosylation, glypiation (GPI anchor attachment), and/or (e.g., and) phosphoglycosylation. In some embodiments, the one or more sugar or carbohydrate molecules are monosaccharides, disaccharides, oligosaccharides, or glycans. In some embodiments, the one or more sugar or carbohydrate molecule is a branched oligosaccharide or a branched glycan. In some embodiments, the one or more sugar or carbohydrate molecule includes a mannose unit, a glucose unit, an N-acetylglucosamine unit, an N-acetylgalactosamine unit, a galactose unit, a fucose unit, or a phospholipid unit. In some embodiments, there are about 1-10, about 1-5, about 5-10, about 1-4, about 1-3, or about 2 sugar molecules. In some embodiments, a glycosylated antibody is fully or partially glycosylated. In some embodiments, an antibody is glycosylated by chemical reactions or by enzymatic means. In some embodiments, an antibody is glycosylated in vitro or inside a cell, which may optionally be deficient in an enzyme in the N- or O-glycosylation pathway, e.g., a glycosyltransferase. In some embodiments, an antibody is functionalized with sugar or carbohydrate molecules as described in International Patent Application Publication WO2014065661, published on May 1, 2014, entitled, “Modified antibody, antibody-conjugate and process for the preparation thereof”.

[0309] In some embodiments, any one of the anti-TfR1 antibodies described herein may comprise a signal peptide in the heavy and/or (e.g., and) light chain sequence (e.g., a N-terminal signal peptide). In some embodiments, the anti-TfR1 antibody described herein comprises any one of the VH and VL sequences, any one of the IgG heavy chain and light chain sequences, or any one of the Fab heavy chain and light chain sequences described herein, and further comprises a signal peptide (e.g., a N-terminal signal peptide). In some embodiments, the signal peptide comprises the amino acid sequence of MGWSCIILFLVATATGVHS (SEQ ID NO: 104).

### Other Known Anti-Transferrin Receptor 1 Antibodies

[0310] Any other appropriate anti-transferrin receptor 1 antibodies known in the art may be used as the muscle-targeting agent in the complexes disclosed herein. Examples of known anti-transferrin receptor 1 antibodies, including associated references and binding epitopes, are listed in Table 6. In some embodiments, the anti-transferrin receptor 1 antibody comprises the complementarity determining regions (CDR-H1, CDR-H2, CDR-H3, CDR-L1, CDR-L2, and CDR-L3) of any of the anti-transferrin receptor 1 antibodies provided herein, e.g., anti-transferrin receptor 1 antibodies listed in Table 6.

TABLE 6
List of anti-transferrin receptor 1 antibody clones, including associated
references and binding epitope information.

| Antibody | | |
|---|---|---|
| Clone Name | Reference(s) | Epitope/Notes |
| OKT9 | U.S. Pat. No. 4,364,934, filed Dec. 4, 1979, | Apical domain of TfR |
| | entitled “MONOCLONAL ANTIBODY | (residues 305-366 of |
| | TO A HUMAN EARLY THYMOCYTE | human TfR sequence |
| | ANTIGEN AND METHODS FOR | XM_052730.3 (SEQ |
| | PREPARING SAME” | ID NO: 404), available |
| | Schneider C. et al. “Structural features of | in GenBank) |
| | the cell surface receptor for transferrin that | |
| | is recognized by the monoclonal antibody | |
| | OKT9.” J Biol Chem. 1982, 257: 14, 8516- | |
| | 8522. | |
| (From JCR) | WO 2015/098989, filed Dec. 24, 2014, | Apical domain |
| Clone M11 | “Novel anti-Transferrin receptor | (residues 230-244 and |
| Clone M23 | antibody that passes through blood- | 326-347 of TfR) and |
| Clone M27 | brain barrier” | protease-like domain |
| Clone B84 | U.S. Pat. No. 9,994,641, filed | (residues 461-473) |
| | Dec. 24, 2014, “Novel anti-Transferrin | |
| | receptor antibody that passes through | |
| | blood-brain barrier” | |
| (From | WO 2016/081643, filed May 26, 2016, | Apical domain and |
| Genentech) | entitled “ANTI-TRANSFERRIN | non-apical regions |
| 7A4, 8A2, | RECEPTOR ANTIBODIES AND | |
| 15D2, 10D11, | METHODS OF USE” | |
| 7B10, 15G11, | U.S. Pat. No. 9,708,406, filed | |
| 16G5, 13C3, | May 20, 2014, “Anti-transferrin receptor | |
| 16G4, 16F6, | antibodies and methods of use” | |
| 7G7, 4C2, | | |
| 1B12, and | | |
| 13D4 | | |
| (From | Lee et al. “Targeting Rat Anti-Mouse | |
| Armagen) | Transferrin Receptor Monoclonal | |
| 8D3 | Antibodies through Blood-Brain | |
| | Barrier in Mouse” 2000, J Pharmacol. | |
| | Exp. Ther., 292: 1048-1052. | |
| | U.S. patent application 2010/077498, filed | |
| | Sep. 11, 2008, entitled “COMPOSITIONS | |
| | AND METHODS FOR BLOOD- | |
| | BRAIN BARRIER DELIVERY IN | |
| | THE MOUSE” | |
| OX26 | Haobam, B. et al. 2014. Rab17- | |
| | mediated recycling endosomes | |
| | contribute to autophagosome formation | |
| | in response to Group A Streptococcus | |
| | invasion. Cellular microbiology. 16: | |
| | 1806-21. | |
| DF1513 | Ortiz-Zapater E et al. Trafficking of | |
| | the human transferrin receptor in plant | |
| | cells: effects of tyrphostin A23 and | |
| | brefeldin A. Plant J 48: 757-70 (2006). | |
| 1A1B2, | Commercially available anti-transferrin | Novus Biologicals |
| 66IG10, | receptor antibodies. | 8100 Southpark Way, |
| MEM-189, | | A-8 Littleton CO |
| JF0956, 29806, | | 80120 |
| 1A1B2, | | |
| TFRC/1818, | | |
| 1E6, 66Ig10, | | |
| TFRC/1059, | | |
| Q1/71, 23D10, | | |
| 13E4, | | |
| TFRC/1149, | | |
| ER-MP21, | | |
| YTA74.4, | | |
| BU54, 2B6, | | |
| RI7 217 | | |
| (From | U.S. patent application 2011/0311544A1, filed | Does not compete |
| INSERM) | Jun. 15, 2005, entitled “ANTI-CD71 | with OKT9 |
| BA120g | MONOCLONAL ANTIBODIES AND | |
| | USES THEREOF FOR TREATING | |
| | MALIGNANT TUMOR CELLS” | |
| LUCA31 | U.S. Pat. No. 7,572,895, filed | “LUCA31 epitope” |
| | Jun. 7, 2004, entitled “TRANSFERRIN | |
| | RECEPTOR ANTIBODIES” | |
| (Salk Institute) | Trowbridge, I.S. et al. “Anti-transferrin | |
| B3/25 | receptor monoclonal antibody and | |
| T58/30 | toxin-antibody conjugates affect | |
| | growth of human tumour cells.” | |
| | Nature, 1981, volume 294, pages 171- | |
| | 173 | |
| R17 217.1.3, | Commercially available anti-transferrin | BioXcell |
| 5E9C11, | receptor antibodies. | 10 Technology Dr., |
| OKT9 | | Suite 2B |
| (BE0023 | | West Lebanon, NH |
| clone) | | 03784-1671 USA |
| BK19.9, | Gatter, K.C. et al. “Transferrin | |
| B3/25, T56/14 | receptors in human tissues: their | |
| and T58/1 | distribution and possible clinical | |
| | relevance.” J Clin Pathol. 1983 | |
| | May; 36(5): 539-45. | |

[0311] In some embodiments, anti-TfR1 antibodies of the present disclosure include one or more of the CDR-H (e.g., CDR-H1, CDR-H2, and CDR-H3) amino acid sequences from any one of the anti-TfR1 antibodies selected from Table 6. In some embodiments, anti-TfR1 antibodies include the CDR-H1, CDR-H2, and CDR-H3 as provided for any one of the anti-TfR1 antibodies selected from Table 6. In some embodiments, anti-TfR1 antibodies include the CDR-L1, CDR-L2, and CDR-L3 as provided for any one of the anti-TfR1 antibodies selected from Table 6. In some embodiments, anti-TfR1 antibodies include the CDR-H1, CDR-H2, CDR-H3, CDR-L1, CDR-L2, and CDR-L3 as provided for any one of the anti-TfR1 antibodies selected from Table 6. The disclosure also includes any nucleic acid sequence that encodes a molecule comprising a CDR-H1, CDR-H2, CDR-H3, CDR-L1, CDR-L2, or CDR-L3 as provided for any one of the anti-TfR1 antibodies selected from Table 6. In some embodiments, antibody heavy and light chain CDR3 domains may play a particularly important role in the binding specificity/affinity of an antibody for an antigen. Accordingly, anti-TfR1 antibodies of the disclosure may include at least the heavy and/or (e.g., and) light chain CDR3s of any one of the anti-TfR1 antibodies selected from Table 6.

[0312] In some examples, any of the anti-TfR1 antibodies of the disclosure have one or more CDR (e.g., CDR-H or CDR-L) sequences substantially similar to any of the CDR-H1, CDR-H2, CDR-H3, CDR-L1, CDR-L2, and/or (e.g., and) CDR-L3 sequences from one of the anti-TfR1 antibodies selected from Table 6. In some embodiments, the position of one or more CDRs along the VH (e.g., CDR-H1, CDR-H2, or CDR-H3) and/or (e.g., and) VL (e.g., CDR-L1, CDR-L2, or CDR-L3) region of an antibody described herein can vary by one, two, three, four, five, or six amino acid positions so long as immunospecific binding to transferrin receptor (e.g., human transferrin receptor) is maintained (e.g., substantially maintained, for example, at least 50%, at least 60%, at least 70%, at least 80%, at least 90%, at least 95% of the binding of the original antibody from which it is derived). For example, in some embodiments, the position defining a CDR of any antibody described herein can vary by shifting the N-terminal and/or (e.g., and) C-terminal boundary of the CDR by one, two, three, four, five, or six amino acids, relative to the CDR position of any one of the antibodies described herein, so long as immunospecific binding to transferrin receptor (e.g., human transferrin receptor) is maintained (e.g., substantially maintained, for example, at least 50%, at least 60%, at least 70%, at least 80%, at least 90%, at least 95% of the binding of the original antibody from which it is derived). In another embodiment, the length of one or more CDRs along the VH (e.g., CDR-H1, CDR-H2, or CDR-H3) and/or (e.g., and) VL (e.g., CDR-L1, CDR-L2, or CDR-L3) region of an antibody described herein can vary (e.g., be shorter or longer) by one, two, three, four, five, or more amino acids, so long as immunospecific binding to transferrin receptor (e.g., human transferrin receptor) is maintained (e.g., substantially maintained, for example, at least 50%, at least 60%, at least 70%, at least 80%, at least 90%, at least 95% of the binding of the original antibody from which it is derived).

[0313] Accordingly, in some embodiments, a CDR-L1, CDR-L2, CDR-L3, CDR-H1, CDR-H2, and/or (e.g., and) CDR-H3 described herein may be one, two, three, four, five or more amino acids shorter than one or more of the CDRs described herein (e.g., CDRs from any of the anti-transferrin receptor 1 antibodies selected from Table 6) so long as immunospecific binding to transferrin receptor (e.g., human transferrin receptor) is maintained (e.g., substantially maintained, for example, at least 50%, at least 60%, at least 70%, at least 80%, at least 90%, at least 95% relative to the binding of the original antibody from which it is derived). In some embodiments, a CDR-L1, CDR-L2, CDR-L3, CDR-H1, CDR-H2, and/or (e.g., and) CDR-H3 described herein may be one, two, three, four, five or more amino acids longer than one or more of the CDRs described herein (e.g., CDRs from any of the anti-transferrin receptor 1 antibodies selected from Table 6) so long as immunospecific binding to transferrin receptor (e.g., human transferrin receptor) is maintained (e.g., substantially maintained, for example, at least 50%, at least 60%, at least 70%, at least 80%, at least 90%, at least 95% relative to the binding of the original antibody from which it is derived). In some embodiments, the amino portion of a CDR-L1, CDR-L2, CDR-L3, CDR-H1, CDR-H2, and/or (e.g., and) CDR-H3 described herein can be extended by one, two, three, four, five or more amino acids compared to one or more of the CDRs described herein (e.g., CDRs from any of the anti-transferrin receptor 1 antibodies selected from Table 6) so long as immunospecific binding to transferrin receptor (e.g., human transferrin receptor is maintained (e.g., substantially maintained, for example, at least 50%, at least 60%, at least 70%, at least 80%, at least 90%, at least 95% relative to the binding of the original antibody from which it is derived). In some embodiments, the carboxy portion of a CDR-L1, CDR-L2, CDR-L3, CDR-H1, CDR-H2, and/or (e.g., and) CDR-H3 described herein can be extended by one, two, three, four, five or more amino acids compared to one or more of the CDRs described herein (e.g., CDRs from any of the anti-transferrin receptor 1 antibodies selected from Table 6) so long as immunospecific binding to transferrin receptor (e.g., human transferrin receptor) is maintained (e.g., substantially maintained, for example, at least 50%, at least 60%, at least 70%, at least 80%, at least 90%, at least 95% relative to the binding of the original antibody from which it is derived). In some embodiments, the amino portion of a CDR-L1, CDR-L2, CDR-L3, CDR-H1, CDR-H2, and/or (e.g., and) CDR-H3 described herein can be shortened by one, two, three, four, five or more amino acids compared to one or more of the CDRs described herein (e.g., CDRs from any of the anti-transferrin receptor 1 antibodies selected from Table 6) so long as immunospecific binding to transferrin receptor (e.g., human transferrin receptor) is maintained (e.g., substantially maintained, for example, at least 50%, at least 60%, at least 70%, at least 80%, at least 90%, at least 95% relative to the binding of the original antibody from which it is derived). In some embodiments, the carboxy portion of a CDR-L1, CDR-L2, CDR-L3, CDR-H1, CDR-H2, and/or (e.g., and) CDR-H3 described herein can be shortened by one, two, three, four, five or more amino acids compared to one or more of the CDRs described herein (e.g., CDRs from any of the anti-transferrin receptor 1 antibodies selected from Table 6) so long as immunospecific binding to transferrin receptor (e.g., human transferrin receptor) is maintained (e.g., substantially maintained, for example, at least 50%, at least 60%, at least 70%, at least 80%, at least 90%, at least 95% relative to the binding of the original antibody from which it is derived). Any method can be used to ascertain whether immunospecific binding to transferrin receptor (e.g., human transferrin receptor) is maintained, for example, using binding assays and conditions described in the art.

[0314] In some examples, any of the anti-transferrin receptor 1 antibodies of the disclosure have one or more CDR (e.g., CDR-H or CDR-L) sequences substantially similar to any one of the anti-transferrin receptor 1 antibodies selected from Table 6. For example, the antibodies may include one or more CDR sequence(s) from any of the anti-transferrin receptor 1 antibodies selected from Table 6 containing up to 5, 4, 3, 2, or 1 amino acid residue variations as compared to the corresponding CDR region in any one of the CDRs provided herein (e.g., CDRs from any of the anti-transferrin receptor 1 antibodies selected from Table 6) so long as immunospecific binding to transferrin receptor (e.g., human transferrin receptor) is maintained (e.g., substantially maintained, for example, at least 50%, at least 60%, at least 70%, at least 80%, at least 90%, at least 95% relative to the binding of the original antibody from which it is derived). In some embodiments, any of the amino acid variations in any of the CDRs provided herein may be conservative variations. Conservative variations can be introduced into the CDRs at positions where the residues are not likely to be involved in interacting with a transferrin receptor protein (e.g., a human transferrin receptor protein), for example, as determined based on a crystal structure. Some aspects of the disclosure provide transferrin receptor antibodies that comprise one or more of the heavy chain variable (VH) and/or (e.g., and) light chain variable (VL) domains provided herein. In some embodiments, any of the VH domains provided herein include one or more of the CDR-H sequences (e.g., CDR-H1, CDR-H2, and CDR-H3) provided herein, for example, any of the CDR-H sequences provided in any one of the anti-transferrin receptor 1 antibodies selected from Table 6. In some embodiments, any of the VL domains provided herein include one or more of the CDR-L sequences (e.g., CDR-L1, CDR-L2, and CDR-L3) provided herein, for example, any of the CDR-L sequences provided in any one of the anti-transferrin receptor 1 antibodies selected from Table 6.

[0315] In some embodiments, anti-TfR1 antibodies of the disclosure include any antibody that includes a heavy chain variable domain and/or (e.g., and) a light chain variable domain of any anti-transferrin receptor 1 antibody, such as any one of the anti-TfR1 antibodies selected from Table 6. In some embodiments, anti-TfR1 antibodies of the disclosure include any antibody that includes the heavy chain variable and light chain variable pairs of any anti-transferrin receptor 1 antibody, such as any one of the anti-TfR1 antibodies selected from Table 6.

[0316] Aspects of the disclosure provide anti-TfR1 antibodies having a heavy chain variable (VH) and/or (e.g., and) a light chain variable (VL) domain amino acid sequence homologous to any of those described herein. In some embodiments, the anti-TfR1 antibody comprises a heavy chain variable sequence or a light chain variable sequence that is at least 75% (e.g., 80%, 85%, 90%, 95%, 98%, or 99%) identical to the heavy chain variable sequence and/or any light chain variable sequence of any anti-TfR1 antibody, such as any one of the anti-TfR1 antibodies selected from Table 6. In some embodiments, the homologous heavy chain variable and/or (e.g., and) a light chain variable amino acid sequences do not vary within any of the CDR sequences provided herein. For example, in some embodiments, the degree of sequence variation (e.g., 75%, 80%, 85%, 90%, 95%, 98%, or 99%) may occur within a heavy chain variable and/or (e.g., and) a light chain variable sequence excluding any of the CDR sequences provided herein. In some embodiments, any of the anti-TfR1 antibodies provided herein comprise a heavy chain variable sequence and a light chain variable sequence that comprises a framework sequence that is at least 75%, 80%, 85%, 90%, 95%, 98%, or 99% identical to the framework sequence of any anti-TfR1 antibody, such as any one of the anti-TfR1 antibodies selected from Table 6.

[0317] In some embodiments, an anti-transferrin receptor 1 antibody, which specifically binds to transferrin receptor (e.g., human transferrin receptor), comprises a light chain variable VL domain comprising any of the CDR-L domains (CDR-L1, CDR-L2, and CDR-L3), or CDR-L domain variants provided herein, of any of the anti-transferrin receptor 1 antibodies selected from Table 6. In some embodiments, an anti-transferrin receptor 1 antibody, which specifically binds to transferrin receptor (e.g., human transferrin receptor), comprises a light chain variable VL domain comprising the CDR-L1, the CDR-L2, and the CDR-L3 of any anti-transferrin receptor 1 antibody, such as any one of the anti-transferrin receptor 1 antibodies selected from Table 6. In some embodiments, the anti-transferrin receptor 1 antibody comprises a light chain variable (VL) region sequence comprising one, two, three or four of the framework regions of the light chain variable region sequence of any anti-transferrin receptor 1 antibody, such as any one of the anti-transferrin receptor 1 antibodies selected from Table 6. In some embodiments, the anti-transferrin receptor 1 antibody comprises one, two, three or four of the framework regions of a light chain variable region sequence which is at least 75%, 80%, 85%, 90%, 95%, or 100% identical to one, two, three or four of the framework regions of the light chain variable region sequence of any anti-transferrin receptor 1 antibody, such as any one of the anti-transferrin receptor 1 antibodies selected from Table 6. In some embodiments, the light chain variable framework region that is derived from said amino acid sequence consists of said amino acid sequence but for the presence of up to 10 amino acid substitutions, deletions, and/or (e.g., and) insertions, preferably up to 10 amino acid substitutions. In some embodiments, the light chain variable framework region that is derived from said amino acid sequence consists of said amino acid sequence with 1, 2, 3, 4, 5, 6, 7, 8, 9 or 10 amino acid residues being substituted for an amino acid found in an analogous position in a corresponding non-human, primate, or human light chain variable framework region.

[0318] In some embodiments, an anti-transferrin receptor 1 antibody that specifically binds to transferrin receptor comprises the CDR-L1, the CDR-L2, and the CDR-L3 of any anti-transferrin receptor 1 antibody, such as any one of the anti-transferrin receptor 1 antibodies selected from Table 6. In some embodiments, the antibody further comprises one, two, three or all four VL framework regions derived from the VL of a human or primate antibody. The primate or human light chain framework region of the antibody selected for use with the light chain CDR sequences described herein, can have, for example, at least 70% (e.g., at least 75%, 80%, 85%, 90%, 95%, 98%, or at least 99%) identity with a light chain framework region of a non-human parent antibody. The primate or human antibody selected can have the same or substantially the same number of amino acids in its light chain complementarity determining regions to that of the light chain complementarity determining regions of any of the antibodies provided herein, e.g., any of the anti-transferrin receptor 1 antibodies selected from Table 6. In some embodiments, the primate or human light chain framework region amino acid residues are from a natural primate or human antibody light chain framework region having at least 75% identity, at least 80% identity, at least 85% identity, at least 90% identity, at least 95% identity, at least 98% identity, at least 99% (or more) identity with the light chain framework regions of any anti-transferrin receptor 1 antibody, such as any one of the anti-transferrin receptor 1 antibodies selected from Table 6. In some embodiments, an anti-transferrin receptor 1 antibody further comprises one, two, three or all four VL framework regions derived from a human light chain variable kappa subfamily. In some embodiments, an anti-transferrin receptor 1 antibody further comprises one, two, three or all four VL framework regions derived from a human light chain variable lambda subfamily.

[0319] In some embodiments, any of the anti-transferrin receptor 1 antibodies provided herein comprise a light chain variable domain that further comprises a light chain constant region. In some embodiments, the light chain constant region is a kappa, or a lambda light chain constant region. In some embodiments, the kappa or lambda light chain constant region is from a mammal, e.g., from a human, monkey, rat, or mouse. In some embodiments, the light chain constant region is a human kappa light chain constant region. In some embodiments, the light chain constant region is a human lambda light chain constant region. It should be appreciated that any of the light chain constant regions provided herein may be variants of any of the light chain constant regions provided herein. In some embodiments, the light chain constant region comprises an amino acid sequence that is at least 75%, 80%, 85%, 90%, 95%, 98%, or 99% identical to any of the light chain constant regions of any anti-transferrin receptor 1 antibody, such as any one of the anti-transferrin receptor 1 antibodies selected from Table 6.

[0320] In some embodiments, the anti-transferrin receptor 1 antibody is any anti-transferrin receptor 1 antibody, such as any one of the anti-transferrin receptor 1 antibodies selected from Table 6.

[0321] In some embodiments, an anti-transferrin receptor 1 antibody comprises a VL domain comprising the amino acid sequence of any anti-transferrin receptor 1 antibody, such as any one of the anti-transferrin receptor 1 antibodies selected from Table 6, and wherein the constant regions comprise the amino acid sequences of the constant regions of an IgG, IgE, IgM, IgD, IgA or IgY immunoglobulin molecule, or a human IgG, IgE, IgM, IgD, IgA or IgY immunoglobulin molecule. In some embodiments, an anti-transferrin receptor 1 antibody comprises any of the VL domains, or VL domain variants, and any of the VH domains, or VH domain variants, wherein the VL and VH domains, or variants thereof, are from the same antibody clone, and wherein the constant regions comprise the amino acid sequences of the constant regions of an IgG, IgE, IgM, IgD, IgA or IgY immunoglobulin molecule, any class (e.g., IgG1, IgG2, IgG3, IgG4, IgA1 and IgA2), or any subclass (e.g., IgG2a and IgG2b) of immunoglobulin molecule. Non-limiting examples of human constant regions are described in the art, e.g., see Kabat E A et al., (1991) supra.

[0322] In some embodiments, the muscle-targeting agent is a transferrin receptor antibody (e.g., the antibody and variants thereof as described in International Application Publication WO 2016/081643, incorporated herein by reference).

[0323] The heavy chain and light chain CDRs of the antibody according to different definition systems are provided in Table 7. The different definition systems, e.g., the Kabat definition, the Chothia definition, and/or (e.g., and) the contact definition have been described. See, e.g., (e.g., Kabat, E. A., et al. (1991) Sequences of Proteins of Immunological Interest, Fifth Edition, U.S. Department of Health and Human Services, NIH Publication No. 91-3242, Chothia et al., (1989) Nature 342:877; Chothia, C. et al. (1987) J. Mol. Biol. 196:901-917, A1-lazikani et al (1997) J. Molec. Biol. 273:927-948; and Almagro, J. Mol. Recognit. 17:132-143 (2004). See also hgmp.mrc.ac.uk and bioinf.org.uk/abs).

[0324] An example of a transferrin receptor antibody that may be used in accordance with the present disclosure is described in International Application Publication WO 2016/081643, incorporated herein by reference. The CDR amino acid sequences of this antibody are provided in Table 7.

TABLE 7
Heavy chain and light chain CDRs of a mouse transferrin receptor antibody

| Sequence Type | Kabat | Chothia | Contact |
|---|---|---|---|
| CDR-H1 | SYWMH | GYTFTSY | TSYWMH |
| | (SEQ ID NO: 110) | (SEQ ID NO: 16) | (SEQ ID NO: 118) |
| CDR-H2 | EINPTNGRTNYIE | NPTNGR | WIGEINPTNGRTN |
| | KFKS (SEQ ID NO: | (SEQ ID NO: 117) | (SEQ ID NO: 119) |
| | 111) | | |
| CDR-H3 | GTRAYHY (SEQ | GTRAYHY | ARGTRA (SEQ ID NO: |
| | ID NO: 112) | (SEQ ID NO: 112) | 120) |
| CDR-L1 | RASDNLYSNLA | RASDNLYSNLA (SEQ ID | YSNLAWY (SEQ ID NO: |
| | (SEQ ID NO: 113) | NO: 113) | 121) |
| CDR-L2 | DATNLAD (SEQ | DATNLAD (SEQ ID NO: | LLVYDATNLA (SEQ ID |
| | ID NO: 114) | 114) | NO: 122) |
| CDR-L3 | QHFWGTPLT | QHFWGTPLT (SEQ ID NO: | QHFWGTPL (SEQ ID |
| | (SEQ ID NO: 115) | 115) | NO: 123) |

[0325] The heavy chain variable domain (VH) and light chain variable domain sequences are also provided:

VH
(SEQ ID NO: 124)
QVQLQQPGAELVKPGASVKLSCKASGYTFTSYWMHWVKQRPGQGLEWIG
EINPTNGRTNYIEKFKSKATLTVDKSSSTAYMQLSSLTSEDSAVYYCAR
GTRAYHYWGQGTSVTVSS
VL
(SEQ ID NO: 125)
DIQMTQSPASLSVSVGETVTITCRASDNLYSNLAWYQQKQGKSPQLLVY
DATNLADGVPSRFSGSGSGTQYSLKINSLQSEDFGTYYCQHFWGTPLTF
GAGTKLELK

[0326] In some embodiments, the anti-TfR1 antibody of the present disclosure comprises a CDR-H1, a CDR-H2, and a CDR-H3 that are the same as the CDR-H1, CDR-H2, and CDR-H3 shown in Table 7. Alternatively or in addition (e.g., in addition), the anti-TfR1 antibody of the present disclosure comprises a CDR-L1, a CDR-L2, and a CDR-L3 that are the same as the CDR-L1, CDR-L2, and CDR-L3 shown in Table 7.

[0327] In some embodiments, the anti-TfR1 antibody of the present disclosure comprises a CDR-H1, a CDR-H2, and a CDR-H3, which collectively contains no more than 5 amino acid variations (e.g., no more than 5, 4, 3, 2, or 1 amino acid variation) as compared with the CDR-H1, CDR-H2, and CDR-H3 as shown in Table 7. “Collectively” means that the total number of amino acid variations in all of the three heavy chain CDRs is within the defined range. Alternatively or in addition (e.g., in addition), the anti-TfR1 antibody of the present disclosure may comprise a CDR-L1, a CDR-L2, and a CDR-L3, which collectively contains no more than 5 amino acid variations (e.g., no more than 5, 4, 3, 2 or 1 amino acid variation) as compared with the CDR-L1, CDR-L2, and CDR-L3 as shown in Table 7.

[0328] In some embodiments, the anti-TfR1 antibody of the present disclosure comprises a CDR-H1, a CDR-H2, and a CDR-H3, at least one of which contains no more than 3 amino acid variations (e.g., no more than 3, 2, or 1 amino acid variation) as compared with the counterpart heavy chain CDR as shown in Table 7. Alternatively or in addition (e.g., in addition), the anti-TfR1 antibody of the present disclosure may comprise CDR-L1, a CDR-L2, and a CDR-L3, at least one of which contains no more than 3 amino acid variations (e.g., no more than 3, 2, or 1 amino acid variation) as compared with the counterpart light chain CDR as shown in Table 7.

[0329] In some embodiments, the anti-TfR1 antibody of the present disclosure comprises a CDR-L3, which contains no more than 3 amino acid variations (e.g., no more than 3, 2, or 1 amino acid variation) as compared with the CDR-L3 as shown in Table 7. In some embodiments, the anti-TfR1 antibody of the present disclosure comprises a CDR-L3 containing one amino acid variation as compared with the CDR-L3 as shown in Table 7. In some embodiments, the anti-TfR1 antibody of the present disclosure comprises a CDR-L3 of QHFAGTPLT (SEQ ID NO: 126) (according to the Kabat and Chothia definition system) or QHFAGTPL (SEQ ID NO: 127) (according to the Contact definition system). In some embodiments, the anti-TfR1 antibody of the present disclosure comprises a CDR-H1, a CDR-H2, a CDR-H3, a CDR-L1 and a CDR-L2 that are the same as the CDR-H1, CDR-H2, and CDR-H3 shown in Table 7, and comprises a CDR-L3 of QHFAGTPLT (SEQ ID NO: 126) (according to the Kabat and Chothia definition system) or QHFAGTPL (SEQ ID NO: 127) (according to the Contact definition system).

[0330] In some embodiments, the anti-TfR1 of the present disclosure comprises heavy chain CDRs that collectively are at least 80% (e.g., 80%, 85%, 90%, 95%, or 98%) identical to the heavy chain CDRs as shown in Table 7. Alternatively or in addition (e.g., in addition), the anti-TfR1 antibody of the present disclosure comprises light chain CDRs that collectively are at least 80% (e.g., 80%, 85%, 90%, 95%, or 98%) identical to the light chain CDRs as shown in Table 7.

[0331] In some embodiments, the anti-TfR1 antibody of the present disclosure comprises a VH comprising the amino acid sequence of SEQ ID NO: 124. Alternatively or in addition (e.g., in addition), the anti-TfR1 antibody of the present disclosure comprises a VL comprising the amino acid sequence of SEQ ID NO: 125.

In some embodiments, the anti-TfR1 antibody of the present disclosure comprises a VH containing no more than 25 amino acid variations (e.g., no more than 25, 24, 23, 22, 21, 20, 19, 18, 17, 16, 15, 14, 13, 12, 11, 10, 9, 8, 7, 6, 5, 4, 3, 2, or 1 amino acid variation) as compared with the VH as set forth in SEQ ID NO: 128. Alternatively or in addition (e.g., in addition), the anti-TfR1 antibody of the present disclosure comprises a VL containing no more than 15 amino acid variations (e.g., no more than 20, 19, 18, 17, 16, 15, 14, 13, 12, 11, 9, 8, 7, 6, 5, 4, 3, 2, or 1 amino acid variation) as compared with the VL as set forth in SEQ ID NO: 129.

[0332] In some embodiments, the transferrin receptor antibody of the present disclosure comprises a VH comprising an amino acid sequence that is at least 80% (e.g., 80%, 85%, 90%, 95%, or 98%) identical to the VH as set forth in SEQ ID NO: 124. Alternatively or in addition (e.g., in addition), the transferrin receptor antibody of the present disclosure comprises a VL comprising an amino acid sequence that is at least 80% (e.g., 80%, 85%, 90%, 95%, or 98%) identical to the VL as set forth in SEQ ID NO: 125.

[0333] In some embodiments, the transferrin receptor antibody of the present disclosure is a humanized antibody (e.g., a humanized variant of an antibody). In some embodiments, the transferrin receptor antibody of the present disclosure comprises a CDR-H1, a CDR-H2, a CDR-H3, a CDR-L1, a CDR-L2, and a CDR-L3 that are the same as the CDR-H1, CDR-H2, and CDR-H3 shown in Table 7, and comprises a humanized heavy chain variable region and/or (e.g., and) a humanized light chain variable region.

[0334] Humanized antibodies are human immunoglobulins (recipient antibody) in which residues from a complementary determining region (CDR) of the recipient are replaced by residues from a CDR of a non-human species (donor antibody) such as mouse, rat, or rabbit having the desired specificity, affinity, and capacity. In some embodiments, Fv framework region (FR) residues of the human immunoglobulin are replaced by corresponding non-human residues. Furthermore, the humanized antibody may comprise residues that are found neither in the recipient antibody nor in the imported CDR or framework sequences, but are included to further refine and optimize antibody performance. In general, the humanized antibody will comprise substantially all of at least one, and typically two, variable domains, in which all or substantially all of the CDR regions correspond to those of a non-human immunoglobulin and all or substantially all of the FR regions are those of a human immunoglobulin consensus sequence. The humanized antibody optimally also will comprise at least a portion of an immunoglobulin constant region or domain (Fc), typically that of a human immunoglobulin. Antibodies may have Fc regions modified as described in WO 99/58572. Other forms of humanized antibodies have one or more CDRs (one, two, three, four, five, six) which are altered with respect to the original antibody, which are also termed one or more CDRs derived from one or more CDRs from the original antibody. Humanized antibodies may also involve affinity maturation.

[0335] In some embodiments, humanization is achieved by grafting the CDRs (e.g., as shown in Table 7) into the IGKV1-NL1*01 and IGHV1-3*01 human variable domains. In some embodiments, the transferrin receptor antibody of the present disclosure is a humanized variant comprising one or more amino acid substitutions at positions 9, 13, 17, 18, 40, 45, and 70 as compared with the VL as set forth in SEQ ID NO: 125, and/or (e.g., and) one or more amino acid substitutions at positions 1, 5, 7, 11, 12, 20, 38, 40, 44, 66, 75, 81, 83, 87, and 108 as compared with the VH as set forth in SEQ ID NO: 124. In some embodiments, the transferrin receptor antibody of the present disclosure is a humanized variant comprising amino acid substitutions at all of positions 9, 13, 17, 18, 40, 45, and 70 as compared with the VL as set forth in SEQ ID NO: 125, and/or (e.g., and) amino acid substitutions at all of positions 1, 5, 7, 11, 12, 20, 38, 40, 44, 66, 75, 81, 83, 87, and 108 as compared with the VH as set forth in SEQ ID NO: 124.

[0336] In some embodiments, the transferrin receptor antibody of the present disclosure is a humanized antibody and contains the residues at positions 43 and 48 of the VL as set forth in SEQ ID NO: 125. Alternatively or in addition (e.g., in addition), the transferrin receptor antibody of the present disclosure is a humanized antibody and contains the residues at positions 48, 67, 69, 71, and 73 of the VH as set forth in SEQ ID NO: 124.

[0337] The VH and VL amino acid sequences of an example humanized antibody that may be used in accordance with the present disclosure are provided:

Humanized VH
(SEQ ID NO: 128)
EVQLVQSGAEVKKPGASVKVSCKASGYTFTSYWMHWVRQAPGQRLEWIG
EINPTNGRTNYIEKFKSRATLTVDKSASTAYMELSSLRSEDTAVYYCAR
GTRAYHYWGQGTMVTVSS
Humanized VL
(SEQ ID NO: 129)
DIQMTQSPSSLSASVGDRVTITCRASDNLYSNLAWYQQKPGKSPKLLVY
DATNLADGVPSRFSGSGSGTDYTLTISSLQPEDFATYYCQHFWGTPLTF
GQGTKVEIK

[0338] In some embodiments, the transferrin receptor antibody of the present disclosure comprises a VH comprising the amino acid sequence of SEQ ID NO: 128. Alternatively or in addition (e.g., in addition), the transferrin receptor antibody of the present disclosure comprises a VL comprising the amino acid sequence of SEQ ID NO: 129.

[0339] In some embodiments, the transferrin receptor antibody of the present disclosure comprises a VH containing no more than 25 amino acid variations (e.g., no more than 25, 24, 23, 22, 21, 20, 19, 18, 17, 16, 15, 14, 13, 12, 11, 10, 9, 8, 7, 6, 5, 4, 3, 2, or 1 amino acid variation) as compared with the VH as set forth in SEQ ID NO: 128. Alternatively or in addition (e.g., in addition), the transferrin receptor antibody of the present disclosure comprises a VL containing no more than 15 amino acid variations (e.g., no more than 20, 19, 18, 17, 16, 15, 14, 13, 12, 11, 9, 8, 7, 6, 5, 4, 3, 2, or 1 amino acid variation) as compared with the VL as set forth in SEQ ID NO: 129.

[0340] In some embodiments, the transferrin receptor antibody of the present disclosure comprises a VH comprising an amino acid sequence that is at least 80% (e.g., 80%, 85%, 90%, 95%, or 98%) identical to the VH as set forth in SEQ ID NO: 128. Alternatively or in addition (e.g., in addition), the transferrin receptor antibody of the present disclosure comprises a VL comprising an amino acid sequence that is at least 80% (e.g., 80%, 85%, 90%, 95%, or 98%) identical to the VL as set forth in SEQ ID NO: 129.

[0341] In some embodiments, the transferrin receptor antibody of the present disclosure is a humanized variant comprising amino acid substitutions at one or more of positions 43 and 48 as compared with the VL as set forth in SEQ ID NO: 125, and/or (e.g., and) amino acid substitutions at one or more of positions 48, 67, 69, 71, and 73 as compared with the VH as set forth in SEQ ID NO: 124. In some embodiments, the transferrin receptor antibody of the present disclosure is a humanized variant comprising a S43A and/or (e.g., and) a V48L mutation as compared with the VL as set forth in SEQ ID NO: 125, and/or (e.g., and) one or more of A67V, L69I, V71R, and K73T mutations as compared with the VH as set forth in SEQ ID NO: 124.

[0342] In some embodiments, the transferrin receptor antibody of the present disclosure is a humanized variant comprising amino acid substitutions at one or more of positions 9, 13, 17, 18, 40, 43, 48, 45, and 70 as compared with the VL as set forth in SEQ ID NO: 125, and/or (e.g., and) amino acid substitutions at one or more of positions 1, 5, 7, 11, 12, 20, 38, 40, 44, 48, 66, 67, 69, 71, 73, 75, 81, 83, 87, and 108 as compared with the VH as set forth in SEQ ID NO: 124.

[0343] In some embodiments, the transferrin receptor antibody of the present disclosure is a chimeric antibody, which can include a heavy constant region and a light constant region from a human antibody. Chimeric antibodies refer to antibodies having a variable region or part of variable region from a first species and a constant region from a second species. Typically, in these chimeric antibodies, the variable region of both light and heavy chains mimics the variable regions of antibodies derived from one species of mammals (e.g., a non-human mammal such as mouse, rabbit, and rat), while the constant portions are homologous to the sequences in antibodies derived from another mammal such as human. In some embodiments, amino acid modifications can be made in the variable region and/or (e.g., and) the constant region.

[0344] In some embodiments, the transferrin receptor antibody described herein is a chimeric antibody, which can include a heavy constant region and a light constant region from a human antibody. Chimeric antibodies refer to antibodies having a variable region or part of variable region from a first species and a constant region from a second species. Typically, in these chimeric antibodies, the variable region of both light and heavy chains mimics the variable regions of antibodies derived from one species of mammals (e.g., a non-human mammal such as mouse, rabbit, and rat), while the constant portions are homologous to the sequences in antibodies derived from another mammal such as human. In some embodiments, amino acid modifications can be made in the variable region and/or (e.g., and) the constant region.

[0345] In some embodiments, the heavy chain of any of the transferrin receptor antibodies as described herein may comprises a heavy chain constant region (CH) or a portion thereof (e.g., CH1, CH2, CH3, or a combination thereof). The heavy chain constant region can of any suitable origin, e.g., human, mouse, rat, or rabbit. In one specific example, the heavy chain constant region is from a human IgG (a gamma heavy chain), e.g., IgG1, IgG2, or IgG4. An example of human IgG1 constant region is given below:

(SEQ ID NO: 130)
[sequence omitted]

[0346] In some embodiments, the light chain of any of the transferrin receptor antibodies described herein may further comprise a light chain constant region (CL), which can be any CL known in the art. In some examples, the CL is a kappa light chain. In other examples, the CL is a lambda light chain. In some embodiments, the CL is a kappa light chain, the sequence of which is provided below:

(SEQ ID NO: 83)
RTVAAPSVFIFPPSDEQLKSGTASVVCLLNNFYPREAKVQWKVDNALQS
GNSQESVTEQDSKDSTYSLSSTLTLSKADYEKHKVYACEVTHQGLSSPV
TKSFNRGEC

[0347] Other antibody heavy and light chain constant regions are well known in the art, e.g., those provided in the IMGT database (www.imgt.org) or at www.vbase2.org/vbstat.php., both of which are incorporated by reference herein.

[0348] Examples of heavy chain and light chain amino acid sequences of the transferrin receptor antibodies described are provided below:

Heavy Chain (VH + human IgG1 constant region)
(SEQ ID NO: 132)
QVQLQQPGAELVKPGASVKLSCKASGYTFTSYWMHWVKQRPGQGLEWIG
EINPTNGRTNYIEKFKSKATLTVDKSSSTAYMQLSSLTSEDSAVYYCAR
GTRAYHYWGQGTSVTVSSASTKGPSVFPLAPSSKSTSGGTAALGCLVKD
YFPEPVTVSWNSGALTSGVHTFPAVLQSSGLYSLSSVVTVPSSSLGTQT
YICNVNHKPSNTKVDKKVEPKSCDKTHTCPPCPAPELLGGPSVFLFPPK
PKDTLMISRTPEVTCVVVDVSHEDPEVKFNWYVDGVEVHNAKTKPREEQ
YNSTYRVVSVLTVLHQDWLNGKEYKCKVSNKALPAPIEKTISKAKGQPR
EPQVYTLPPSRDELTKNQVSLTCLVKGFYPSDIAVEWESNGQPENNYKT
TPPVLDSDGSFFLYSKLTVDKSRWQQGNVFSCSVMHEALHNHYTQKSLS
LSPGK
Light Chain (VL + kappa light chain)
(SEQ ID NO: 133)
DIQMTQSPASLSVSVGETVTITCRASDNLYSNLAWYQQKQGKSPQLLVY
DATNLADGVPSRFSGSGSGTQYSLKINSLQSEDFGTYYCQHFWGTPLTF
GAGTKLELKRTVAAPSVFIFPPSDEQLKSGTASVVCLLNNFYPREAKVQ
WKVDNALQSGNSQESVTEQDSKDSTYSLSSTLTLSKADYEKHKVYACEV
THQGLSSPVTKSFNRGEC
Heavy Chain (humanized VH + human IgG1 constant
region)
(SEQ ID NO: 134)
EVQLVQSGAEVKKPGASVKVSCKASGYTFTSYWMHWVRQAPGQRLEWIG
EINPTNGRTNYIEKFKSRATLTVDKSASTAYMELSSLRSEDTAVYYCAR
GTRAYHYWGQGTMVTVSSASTKGPSVFPLAPSSKSTSGGTAALGCLVKD
YFPEPVTVSWNSGALTSGVHTFPAVLQSSGLYSLSSVVTVPSSSLGTQT
YICNVNHKPSNTKVDKKVEPKSCDKTHTCPPCPAPELLGGPSVFLFPPK
PKDTLMISRTPEVTCVVVDVSHEDPEVKFNWYVDGVEVHNAKTKPREEQ
YNSTYRVVSVLTVLHQDWLNGKEYKCKVSNKALPAPIEKTISKAKGQPR
EPQVYTLPPSRDELTKNQVSLTCLVKGFYPSDIAVEWESNGQPENNYKT
TPPVLDSDGSFFLYSKLTVDKSRWQQGNVFSCSVMHEALHNHYTQKSLS
LSPGK
Light Chain (humanized VL + kappa light chain)
(SEQ ID NO: 135)
DIQMTQSPSSLSASVGDRVTITCRASDNLYSNLAWYQQKPGKSPKLLVY
DATNLADGVPSRFSGSGSGTDYTLTISSLQPEDFATYYCQHFWGTPLTF
GQGTKVEIKRTVAAPSVFIFPPSDEQLKSGTASVVCLLNNFYPREAKVQ
WKVDNALQSGNSQESVTEQDSKDSTYSLSSTLTLSKADYEKHKVYACEV
THQGLSSPVTKSFNRGEC

[0349] In some embodiments, the transferrin receptor antibody described herein comprises a heavy chain comprising an amino acid sequence that is at least 80% (e.g., 80%, 85%, 90%, 95%, or 98%) identical to SEQ ID NO: 132. Alternatively or in addition (e.g., in addition), the transferrin receptor antibody described herein comprises a light chain comprising an amino acid sequence that is at least 80% (e.g., 80%, 85%, 90%, 95%, or 98%) identical to SEQ ID NO: 133. In some embodiments, the transferrin receptor antibody described herein comprises a heavy chain comprising the amino acid sequence of SEQ ID NO: 132. Alternatively or in addition (e.g., in addition), the transferrin receptor antibody described herein comprises a light chain comprising the amino acid sequence of SEQ ID NO: 133.

[0350] In some embodiments, the transferrin receptor antibody of the present disclosure comprises a heavy chain containing no more than 25 amino acid variations (e.g., no more than 25, 24, 23, 22, 21, 20, 19, 18, 17, 16, 15, 14, 13, 12, 11, 10, 9, 8, 7, 6, 5, 4, 3, 2, or 1 amino acid variation) as compared with the heavy chain as set forth in SEQ ID NO: 132. Alternatively or in addition (e.g., in addition), the transferrin receptor antibody of the present disclosure comprises a light chain containing no more than 15 amino acid variations (e.g., no more than 20, 19, 18, 17, 16, 15, 14, 13, 12, 11, 9, 8, 7, 6, 5, 4, 3, 2, or 1 amino acid variation) as compared with the light chain as set forth in SEQ ID NO: 133.

[0351] In some embodiments, the transferrin receptor antibody described herein comprises a heavy chain comprising an amino acid sequence that is at least 80% (e.g., 80%, 85%, 90%, 95%, or 98%) identical to SEQ ID NO: 134. Alternatively or in addition (e.g., in addition), the transferrin receptor antibody described herein comprises a light chain comprising an amino acid sequence that is at least 80% (e.g., 80%, 85%, 90%, 95%, or 98%) identical to SEQ ID NO: 135. In some embodiments, the transferrin receptor antibody described herein comprises a heavy chain comprising the amino acid sequence of SEQ ID NO: 134. Alternatively or in addition (e.g., in addition), the transferrin receptor antibody described herein comprises a light chain comprising the amino acid sequence of SEQ ID NO: 135.

[0352] In some embodiments, the transferrin receptor antibody of the present disclosure comprises a heavy chain containing no more than 25 amino acid variations (e.g., no more than 25, 24, 23, 22, 21, 20, 19, 18, 17, 16, 15, 14, 13, 12, 11, 10, 9, 8, 7, 6, 5, 4, 3, 2, or 1 amino acid variation) as compared with the heavy chain of humanized antibody as set forth in SEQ ID NO: 134. Alternatively or in addition (e.g., in addition), the transferrin receptor antibody of the present disclosure comprises a light chain containing no more than 15 amino acid variations (e.g., no more than 20, 19, 18, 17, 16, 15, 14, 13, 12, 11, 9, 8, 7, 6, 5, 4, 3, 2, or 1 amino acid variation) as compared with the light chain of humanized antibody as set forth in SEQ ID NO: 135.

[0353] In some embodiments, the transferrin receptor antibody is an antigen binding fragment (Fab) of an intact antibody (full-length antibody). Antigen binding fragment of an intact antibody (full-length antibody) can be prepared via routine methods. For example, F(ab′)2 fragments can be produced by pepsin digestion of an antibody molecule, and Fab′ fragments that can be generated by reducing the disulfide bridges of F(ab′)2 fragments. Examples of Fab amino acid sequences of the transferrin receptor antibodies described herein are provided below:

Heavy Chain Fab (VH + a portion of human IgG1
constant region)
(SEQ ID NO: 136)
QVQLQQPGAELVKPGASVKLSCKASGYTFTSYWMHWVKQRPGQGLEWI
GEINPTNGRTNYIEKFKSKATLTVDKSSSTAYMQLSSLTSEDSAVYYCA
RGTRAYHYWGQGTSVTVSSASTKGPSVFPLAPSSKSTSGGTAALGCLVK
DYFPEPVTVSWNSGALTSGVHTFPAVLQSSGLYSLSSVVTVPSSSLGTQ
TYICNVNHKPSNTKVDKKVEPKSCDKTHTCP
Heavy Chain Fab (humanized VH + a portion of human
IgG1 constant region)
(SEQ ID NO: 137)
EVQLVQSGAEVKKPGASVKVSCKASGYTFTSYWMHWVRQAPGQRLEW
IGEINPTNGRTNYIEKFKSRATLTVDKSASTAYMELSSLRSEDTAVYYC
ARGTRAYHYWGQGTMVTVSSASTKGPSVFPLAPSSKSTSGGTAALGCLV
KDYFPEPVTVSWNSGALTSGVHTFPAVLQSSGLYSLSSVVTVPSSSLGT
QTYICNVNHKPSNTKVDKKVEPKSCDKTHTCP

[0354] In some embodiments, the transferrin receptor antibody described herein comprises a heavy chain comprising the amino acid sequence of SEQ ID NO: 136. Alternatively or in addition (e.g., in addition), the transferrin receptor antibody described herein comprises a light chain comprising the amino acid sequence of SEQ ID NO: 133.

[0355] In some embodiments, the transferrin receptor antibody described herein comprises a heavy chain comprising the amino acid sequence of SEQ ID NO: 137. Alternatively or in addition (e.g., in addition), the transferrin receptor antibody described herein comprises a light chain comprising the amino acid sequence of SEQ ID NO: 135.

[0356] The transferrin receptor antibodies described herein can be in any antibody form, including, but not limited to, intact (i.e., full-length) antibodies, antigen-binding fragments thereof (such as Fab, Fab′, F(ab′)2, Fv), single chain antibodies, bi-specific antibodies, or nanobodies. In some embodiments, the transferrin receptor antibody described herein is a scFv. In some embodiments, the transferrin receptor antibody described herein is a scFv-Fab (e.g., scFv fused to a portion of a constant region). In some embodiments, the transferrin receptor antibody described herein is a scFv fused to a constant region (e.g., human IgG1 constant region as set forth in SEQ ID NO: 130).

[0357] In some embodiments, any one of the anti-TfR1 antibodies described herein is produced by recombinant DNA technology in Chinese hamster ovary (CHO) cell suspension culture, optionally in CHO-K1 cell (e.g., CHO-K1 cells derived from European Collection of Animal Cell Culture, Cat. No. 85051005) suspension culture.

[0358] In some embodiments, an antibody provided herein may have one or more post-translational modifications. In some embodiments, N-terminal cyclization, also called pyroglutamate formation (pyro-Glu), may occur in the antibody at N-terminal Glutamate (Glu) and/or Glutamine (Gln) residues during production. As such, it should be appreciated that an antibody specified as having a sequence comprising an N-terminal glutamate or glutamine residue encompasses antibodies that have undergone pyroglutamate formation resulting from a post-translational modification. In some embodiments, pyroglutamate formation occurs in a heavy chain sequence. In some embodiments, pyroglutamate formation occurs in a light chain sequence.

[0359] b. Other Muscle-Targeting Antibodies

[0360] In some embodiments, the muscle-targeting antibody is an antibody that specifically binds hemojuvelin, caveolin-3, Duchenne muscular dystrophy peptide, or myosin Jib, or CD63. In some embodiments, the muscle-targeting antibody is an antibody that specifically binds a myogenic precursor protein. Exemplary myogenic precursor proteins include, without limitation, ABCG2, M-Cadherin/Cadherin-15, Caveolin-1, CD34, FoxK1, Integrin alpha 7, Integrin alpha 7 beta 1, MYF-5, MyoD, Myogenin, NCAM-1/CD56, Pax3, Pax7, and Pax9. In some embodiments, the muscle-targeting antibody is an antibody that specifically binds a skeletal muscle protein. Exemplary skeletal muscle proteins include, without limitation, alpha-Sarcoglycan, beta-Sarcoglycan, Calpain Inhibitors, Creatine Kinase MM/CKMM, eIF5A, Enolase 2/Neuron-specific Enolase, epsilon-Sarcoglycan, FABP3/H-FABP, GDF-8/Myostatin, GDF-11/GDF-8, Integrin alpha 7, Integrin alpha 7 beta 1, Integrin beta 1/CD29, MCAM/CD146, MyoD, Myogenin, Myosin Light Chain Kinase Inhibitors, NCAM-1/CD56, and Troponin I. In some embodiments, the muscle-targeting antibody is an antibody that specifically binds a smooth muscle protein. Exemplary smooth muscle proteins include, without limitation, alpha-Smooth Muscle Actin, VE-Cadherin, Caldesmon/CALD1, Calponin 1, Desmin, Histamine H2 R, Motilin R/GPR38, Transgelin/TAGLN, and Vimentin. However, it should be appreciated that antibodies to additional targets are within the scope of this disclosure and the exemplary lists of targets provided herein are not meant to be limiting.

[0361] c. Antibody Features/Alterations

[0362] In some embodiments, conservative mutations can be introduced into antibody sequences (e.g., CDRs or framework sequences) at positions where the residues are not likely to be involved in interacting with a target antigen (e.g., transferrin receptor), for example, as determined based on a crystal structure. In some embodiments, one, two or more mutations (e.g., amino acid substitutions) are introduced into the Fc region of a muscle-targeting antibody described herein (e.g., in a CH2 domain (residues 231-340 of human IgG1) and/or CH3 domain (residues 341-447 of human IgG1) and/or the hinge region, with numbering according to the Kabat numbering system (e.g., the EU index in Kabat)) to alter one or more functional properties of the antibody, such as serum half-life, complement fixation, Fc receptor binding and/or antigen-dependent cellular cytotoxicity.

[0363] In some embodiments, one, two or more mutations (e.g., amino acid substitutions) are introduced into the hinge region of the Fc region (CH1 domain) such that the number of cysteine residues in the hinge region are altered (e.g., increased or decreased) as described in, e.g., U.S. Pat. No. 5,677,425. The number of cysteine residues in the hinge region of the CH1 domain can be altered to, e.g., facilitate assembly of the light and heavy chains, or to alter (e.g., increase or decrease) the stability of the antibody or to facilitate linker conjugation.

[0364] In some embodiments, one, two or more mutations (e.g., amino acid substitutions) are introduced into the Fc region of a muscle-targeting antibody described herein (e.g., in a CH2 domain (residues 231-340 of human IgG1) and/or CH3 domain (residues 341-447 of human IgG1) and/or the hinge region, with numbering according to the Kabat numbering system (e.g., the EU index in Kabat)) to increase or decrease the affinity of the antibody for an Fc receptor (e.g., an activated Fc receptor) on the surface of an effector cell. Mutations in the Fc region of an antibody that decrease or increase the affinity of an antibody for an Fc receptor and techniques for introducing such mutations into the Fc receptor or fragment thereof are known to one of skill in the art. Examples of mutations in the Fc receptor of an antibody that can be made to alter the affinity of the antibody for an Fc receptor are described in, e.g., Smith P et al., (2012) PNAS 109: 6181-6186, U.S. Pat. No. 6,737,056, and International Publication Nos. WO 02/060919; WO 98/23289; and WO 97/34631, which are incorporated herein by reference.

[0365] In some embodiments, one, two or more amino acid mutations (i.e., substitutions, insertions or deletions) are introduced into an IgG constant domain, or FcRn-binding fragment thereof (preferably an Fc or hinge-Fc domain fragment) to alter (e.g., decrease or increase) half-life of the antibody in vivo. See, e.g., International Publication Nos. WO 02/060919; WO 98/23289; and WO 97/34631; and U.S. Pat. Nos. 5,869,046, 6,121,022, 6,277,375 and 6,165,745 for examples of mutations that will alter (e.g., decrease or increase) the half-life of an antibody in vivo.

[0366] In some embodiments, one, two or more amino acid mutations (i.e., substitutions, insertions or deletions) are introduced into an IgG constant domain, or FcRn-binding fragment thereof (preferably an Fc or hinge-Fc domain fragment) to decrease the half-life of the anti-transferrin receptor 1 antibody in vivo. In some embodiments, one, two or more amino acid mutations (i.e., substitutions, insertions or deletions) are introduced into an IgG constant domain, or FcRn-binding fragment thereof (preferably an Fc or hinge-Fc domain fragment) to increase the half-life of the antibody in vivo. In some embodiments, the antibodies can have one or more amino acid mutations (e.g., substitutions) in the second constant (CH2) domain (residues 231-340 of human IgG1) and/or the third constant (CH3) domain (residues 341-447 of human IgG1), with numbering according to the EU index in Kabat (Kabat E A et al., (1991) supra). In some embodiments, the constant region of the IgG1 of an antibody described herein comprises a methionine (M) to tyrosine (Y) substitution in position 252, a serine (S) to threonine (T) substitution in position 254, and a threonine (T) to glutamic acid (E) substitution in position 256, numbered according to the EU index as in Kabat. See U.S. Pat. No. 7,658,921, which is incorporated herein by reference. This type of mutant IgG, referred to as “YTE mutant” has been shown to display fourfold increased half-life as compared to wild-type versions of the same antibody (see Dall'Acqua W F et al., (2006) J Biol Chem 281: 23514-24). In some embodiments, an antibody comprises an IgG constant domain comprising one, two, three or more amino acid substitutions of amino acid residues at positions 251-257, 285-290, 308-314, 385-389, and 428-436, numbered according to the EU index as in Kabat.

[0367] In some embodiments, one, two or more amino acid substitutions are introduced into an IgG constant domain Fc region to alter the effector function(s) of the anti-transferrin receptor 1 antibody. The effector ligand to which affinity is altered can be, for example, an Fc receptor or the C1 component of complement. This approach is described in further detail in U.S. Pat. Nos. 5,624,821 and 5,648,260. In some embodiments, the deletion or inactivation (through point mutations or other means) of a constant region domain can reduce Fc receptor binding of the circulating antibody thereby increasing tumor localization. See, e.g., U.S. Pat. Nos. 5,585,097 and 8,591,886 for a description of mutations that delete or inactivate the constant domain and thereby increase tumor localization. In some embodiments, one or more amino acid substitutions may be introduced into the Fc region of an antibody described herein to remove potential glycosylation sites on Fc region, which may reduce Fc receptor binding (see, e.g., Shields R L et al., (2001) J Biol Chem 276: 6591-604).

[0368] In some embodiments, one or more amino in the constant region of a muscle-targeting antibody described herein can be replaced with a different amino acid residue such that the antibody has altered C1q binding and/or reduced or abolished complement dependent cytotoxicity (CDC). This approach is described in further detail in U.S. Pat. No. 6,194,551 (Idusogie et al). In some embodiments, one or more amino acid residues in the N-terminal region of the CH2 domain of an antibody described herein are altered to thereby alter the ability of the antibody to fix complement. This approach is described further in International Publication No. WO 94/29351. In some embodiments, the Fc region of an antibody described herein is modified to increase the ability of the antibody to mediate antibody dependent cellular cytotoxicity (ADCC) and/or to increase the affinity of the antibody for an Fcγ receptor. This approach is described further in International Publication No. WO 00/42072.

[0369] In some embodiments, the heavy and/or light chain variable domain(s) sequence(s) of the antibodies provided herein can be used to generate, for example, CDR-grafted, chimeric, humanized, or composite human antibodies or antigen-binding fragments, as described elsewhere herein. As understood by one of ordinary skill in the art, any variant, CDR-grafted, chimeric, humanized, or composite antibodies derived from any of the antibodies provided herein may be useful in the compositions and methods described herein and will maintain the ability to specifically bind transferrin receptor, such that the variant, CDR-grafted, chimeric, humanized, or composite antibody has at least 50%, at least 60%, at least 70%, at least 80%, at least 90%, at least 95% or more binding to transferrin receptor relative to the original antibody from which it is derived.

[0370] In some embodiments, the antibodies provided herein comprise mutations that confer desirable properties to the antibodies. For example, to avoid potential complications due to Fab-arm exchange, which is known to occur with native IgG4 mAbs, the antibodies provided herein may comprise a stabilizing ‘Adair’ mutation (Angal S., et al., “A single amino acid substitution abolishes the heterogeneity of chimeric mouse/human (IgG4) antibody,” Mol Immunol 30, 105-108; 1993), where serine 228 (EU numbering; residue 241 Kabat numbering) is converted to proline resulting in an IgG1-like hinge sequence. Accordingly, any of the antibodies may include a stabilizing ‘Adair’ mutation.

[0371] As provided herein, antibodies of this disclosure may optionally comprise constant regions or parts thereof. For example, a VL domain may be attached at its C-terminal end to a light chain constant domain like Cκ or Cλ. Similarly, a VH domain or portion thereof may be attached to all or part of a heavy chain like IgA, IgD, IgE, IgG, and IgM, and any isotype subclass. Antibodies may include suitable constant regions (see, for example, Kabat et al., Sequences of Proteins of Immunological Interest, No. 91-3242, National Institutes of Health Publications, Bethesda, Md. (1991)). Therefore, antibodies within the scope of this may disclosure include VH and VL domains, or an antigen binding portion thereof, combined with any suitable constant regions.

[0372] In some embodiments, the anti-TfR1 antibody of the present disclosure is a humanized antibody comprising human framework regions with the CDRs of a murine antibody listed in Table 1 or Table 2 (e.g., 3A4, 3M12, or 5H12). In some embodiments, the anti-TfR1 antibody of the present disclosure is an IgG1 kappa that comprises human framework regions with the CDRs of a murine antibody listed in Table 1 or Table 2 (e.g., 3A4, 3M12, or 5H12). In some embodiments, the anti-TfR1 antibody of the present disclosure is a Fab fragment of an IgG1 kappa that comprises human framework regions with the CDRs of a murine antibody listed in Table 1 or Table 2 (e.g., 3A4, 3M12, or 5H12).

[0373] In some embodiments, any one of the anti-TfR1 antibodies described herein is produced by recombinant DNA technology in Chinese hamster ovary (CHO) cell suspension culture, optionally in CHO-K1 cell (e.g., CHO-K1 cells derived from European Collection of Animal Cell Culture, Cat. No. 85051005) suspension culture.

In some embodiments, an antibody provided herein may have one or more post-translational modifications. In some embodiments, N-terminal cyclization, also called pyroglutamate formation (pyro-Glu), may occur in the antibody at N-terminal Glutamate (Glu) and/or Glutamine (Gln) residues during production. In some embodiments, pyroglutamate formation occurs in a heavy chain sequence. In some embodiments, pyroglutamate formation occurs in a light chain sequence.

[0374] ii. Muscle-Targeting Peptides

[0375] Some aspects of the disclosure provide muscle-targeting peptides as muscle-targeting agents. Short peptide sequences (e.g., peptide sequences of 5-20 amino acids in length) that bind to specific cell types have been described. For example, cell-targeting peptides have been described in Vines e., et al., A. “Cell-penetrating and cell-targeting peptides in drug delivery” Biochim Biophys Acta 2008, 1786: 126-38; Jarver P., et al., “In vivo biodistribution and efficacy of peptide mediated delivery” Trends Pharmacol Sci 2010; 31: 528-35; Samoylova T. I., et al., “Elucidation of muscle-binding peptides by phage display screening” Muscle Nerve 1999; 22: 460-6; U.S. Pat. No. 6,329,501, issued on Dec. 11, 2001, entitled “METHODS AND COMPOSITIONS FOR TARGETING COMPOUNDS TO MUSCLE”; and Samoylov A. M., et al., “Recognition of cell-specific binding of phage display derived peptides using an acoustic wave sensor.” Biomol Eng 2002; 18: 269-72; the entire contents of each of which are incorporated herein by reference. By designing peptides to interact with specific cell surface antigens (e.g., receptors), selectivity for a desired tissue, e.g., muscle, can be achieved. Skeletal muscle-targeting has been investigated and a range of molecular payloads are able to be delivered. These approaches may have high selectivity for muscle tissue without many of the practical disadvantages of a large antibody or viral particle. Accordingly, in some embodiments, the muscle-targeting agent is a muscle-targeting peptide that is from 4 to 50 amino acids in length. In some embodiments, the muscle-targeting peptide is 4, 5, 6, 7, 8, 9, 10, 11, 12, 13, 14, 15, 16, 17, 18, 19, 20, 21, 22, 23, 24, 25, 26, 27, 28, 29, 30, 31, 32, 33, 34, 35, 36, 37, 38, 39, 40, 41, 42, 43, 44, 45, 46, 47, 48, 49, or 50 amino acids in length. Muscle-targeting peptides can be generated using any of several methods, such as phage display.

[0376] In some embodiments, a muscle-targeting peptide may bind to an internalizing cell surface receptor that is overexpressed or relatively highly expressed in muscle cells, e.g., a transferrin receptor, compared with certain other cells. In some embodiments, a muscle-targeting peptide may target, e.g., bind to, a transferrin receptor. In some embodiments, a peptide that targets a transferrin receptor may comprise a segment of a naturally occurring ligand, e.g., transferrin. In some embodiments, a peptide that targets a transferrin receptor is as described in U.S. Pat. No. 6,743,893, filed Nov. 30, 2000, “RECEPTOR-MEDIATED UPTAKE OF PEPTIDES THAT BIND THE HUMAN TRANSFERRIN RECEPTOR”. In some embodiments, a peptide that targets a transferrin receptor is as described in Kawamoto, M. et al, “A novel transferrin receptor-targeted hybrid peptide disintegrates cancer cell membrane to induce rapid killing of cancer cells.” BMC Cancer. 2011 Aug. 18; 11:359. In some embodiments, a peptide that targets a transferrin receptor is as described in U.S. Pat. No. 8,399,653, filed May 20, 2011, “TRANSFERRIN/TRANSFERRIN RECEPTOR-MEDIATED SIRNA DELIVERY”.

[0377] As discussed above, examples of muscle targeting peptides have been reported. For example, muscle-specific peptides were identified using phage display library presenting surface heptapeptides. As one example a peptide having the amino acid sequence ASSLNIA (SEQ ID NO: 375) bound to C2C12 murine myotubes in vitro, and bound to mouse muscle tissue in vivo. Accordingly, in some embodiments, the muscle-targeting agent comprises the amino acid sequence ASSLNIA (SEQ ID NO: 375). This peptide displayed improved specificity for binding to heart and skeletal muscle tissue after intravenous injection in mice with reduced binding to liver, kidney, and brain. Additional muscle-specific peptides have been identified using phage display. For example, a 12 amino acid peptide was identified by phage display library for muscle targeting in the context of treatment for DMD. See, Yoshida D., et al., “Targeting of salicylate to skin and muscle following topical injections in rats.” Int J Pharm 2002; 231: 177-84; the entire contents of which are hereby incorporated by reference. Here, a 12 amino acid peptide having the sequence SKTFNTHPQSTP (SEQ ID NO: 376) was identified and this muscle-targeting peptide showed improved binding to C2C12 cells relative to the ASSLNIA (SEQ ID NO: 375) peptide.

[0378] An additional method for identifying peptides selective for muscle (e.g., skeletal muscle) over other cell types includes in vitro selection, which has been described in Ghosh D., et al., “Selection of muscle-binding peptides from context-specific peptide-presenting phage libraries for adenoviral vector targeting” J Virol 2005; 79: 13667-72; the entire contents of which are incorporated herein by reference. By pre-incubating a random 12-mer peptide phage display library with a mixture of non-muscle cell types, non-specific cell binders were selected out. Following rounds of selection the 12 amino acid peptide TARGEHKEEELI (SEQ ID NO: 377) appeared most frequently. Accordingly, in some embodiments, the muscle-targeting agent comprises the amino acid sequence TARGEHKEEELI (SEQ ID NO: 377).

[0379] A muscle-targeting agent may an amino acid-containing molecule or peptide. A muscle-targeting peptide may correspond to a sequence of a protein that preferentially binds to a protein receptor found in muscle cells. In some embodiments, a muscle-targeting peptide contains a high propensity of hydrophobic amino acids, e.g., valine, such that the peptide preferentially targets muscle cells (e.g., cardiac muscle cells). In some embodiments, a muscle-targeting peptide has not been previously characterized or disclosed. These peptides may be conceived of, produced, synthesized, and/or derivatized using any of several methodologies, e.g., phage displayed peptide libraries, one-bead one-compound peptide libraries, or positional scanning synthetic peptide combinatorial libraries. Exemplary methodologies have been characterized in the art and are incorporated by reference (Gray, B. P. and Brown, K. C. “Combinatorial Peptide Libraries: Mining for Cell-Binding Peptides” Chem Rev. 2014, 114:2, 1020-1081.; Samoylova, T. I. and Smith, B. F. “Elucidation of muscle-binding peptides by phage display screening.” Muscle Nerve, 1999, 22:4. 460-6.). In some embodiments, a muscle-targeting peptide has been previously disclosed (see, e.g., Writer M. J. et al. “Targeted gene delivery to human airway epithelial cells with synthetic vectors incorporating novel targeting peptides selected by phage display.” J. Drug Targeting. 2004; 12:185; Cai, D. “BDNF-mediated enhancement of inflammation and injury in the aging heart.” Physiol Genomics. 2006, 24:3, 191-7.; Zhang, L. “Molecular profiling of heart endothelial cells.” Circulation, 2005, 112:11, 1601-11.; McGuire, M. J. et al. “In vitro selection of a peptide with high selectivity for cardiomyocytes in vivo.” J Mol Biol. 2004, 342:1, 171-82.). Exemplary muscle-targeting peptides comprise an amino acid sequence of the following group: CQAQGQLVC (SEQ ID NO: 378), CSERSMNFC (SEQ ID NO: 379), CPKTRRVPC (SEQ ID NO: 380), WLSEAGPVVTVRALRGTGSW (SEQ ID NO: 381), ASSLNIA (SEQ ID NO: 376), CMQHSMRVC (SEQ ID NO: 382), and DDTRHWG (SEQ ID NO: 383). In some embodiments, a muscle-targeting peptide may comprise about 2-25 amino acids, about 2-20 amino acids, about 2-15 amino acids, about 2-10 amino acids, or about 2-5 amino acids. Muscle-targeting peptides may comprise naturally occurring amino acids, e.g., cysteine, alanine, or non-naturally occurring or modified amino acids. Non-naturally occurring amino acids include β-amino acids, homo-amino acids, proline derivatives, 3-substituted alanine derivatives, linear core amino acids, N-methyl amino acids, and others known in the art. In some embodiments, a muscle-targeting peptide may be linear; in other embodiments, a muscle-targeting peptide may be cyclic, e.g., bicyclic (see, e.g., Silvana, M. G. et al. Mol. Therapy, 2018, 26:1, 132-147.).

[0380] iii. Muscle-Targeting Receptor Ligands

[0381] A muscle-targeting agent may be a ligand, e.g., a ligand that binds to a receptor protein. A muscle-targeting ligand may be a protein, e.g., transferrin, which binds to an internalizing cell surface receptor expressed by a muscle cell (e.g., a cardiac muscle cell). Accordingly, in some embodiments, the muscle-targeting agent is transferrin, or a derivative thereof that binds to a transferrin receptor. A muscle-targeting ligand may alternatively be a small molecule, e.g., a lipophilic small molecule that preferentially targets muscle cells relative to other cell types. Exemplary lipophilic small molecules that may target muscle cells include compounds comprising cholesterol, cholesteryl, stearic acid, palmitic acid, oleic acid, oleyl, linolene, linoleic acid, myristic acid, sterols, dihydrotestosterone, testosterone derivatives, glycerine, alkyl chains, trityl groups, and alkoxy acids.

[0382] iv. Muscle-Targeting Aptamers

[0383] A muscle-targeting agent may be an aptamer, e.g., an RNA aptamer, which preferentially targets muscle cells relative to other cell types. In some embodiments, a muscle-targeting aptamer has not been previously characterized or disclosed. These aptamers may be conceived of, produced, synthesized, and/or derivatized using any of several methodologies, e.g., Systematic Evolution of Ligands by Exponential Enrichment. Exemplary methodologies have been characterized in the art and are incorporated by reference (Yan, A. C. and Levy, M. “Aptamers and aptamer targeted delivery” RNA biology, 2009, 6:3, 316-20.; Germer, K. et al. “RNA aptamers and their therapeutic and diagnostic applications.” Int. J. Biochem. Mol. Biol. 2013; 4: 27-40.). In some embodiments, a muscle-targeting aptamer has been previously disclosed (see, e.g., Phillippou, S. et al. “Selection and Identification of Skeletal-Muscle-Targeted RNA Aptamers.” Mol Ther Nucleic Acids. 2018, 10:199-214.; Thiel, W. H. et al. “Smooth Muscle Cell-targeted RNA Aptamer Inhibits Neointimal Formation.” Mol Ther. 2016, 24:4, 779-87.). Exemplary muscle-targeting aptamers include the A01B RNA aptamer and RNA Apt 14. In some embodiments, an aptamer is a nucleic acid-based aptamer, an oligonucleotide aptamer or a peptide aptamer. In some embodiments, an aptamer may be about 5-15 kDa, about 5-10 kDa, about 10-15 kDa, about 1-5 Da, about 1-3 kDa, or smaller.

[0384] v. Other Muscle-Targeting Agents

[0385] One strategy for targeting a muscle cell (e.g., a cardiac muscle cell) is to use a substrate of a muscle transporter protein, such as a transporter protein expressed on the sarcolemma. In some embodiments, the muscle-targeting agent is a substrate of an influx transporter that is specific to muscle tissue. In some embodiments, the influx transporter is specific to skeletal muscle tissue. Two main classes of transporters are expressed on the skeletal muscle sarcolemma, (1) the adenosine triphosphate (ATP) binding cassette (ABC) superfamily, which facilitate efflux from skeletal muscle tissue and (2) the solute carrier (SLC) superfamily, which can facilitate the influx of substrates into skeletal muscle. In some embodiments, the muscle-targeting agent is a substrate that binds to an ABC superfamily or an SLC superfamily of transporters. In some embodiments, the substrate that binds to the ABC or SLC superfamily of transporters is a naturally occurring substrate. In some embodiments, the substrate that binds to the ABC or SLC superfamily of transporters is a non-naturally occurring substrate, for example, a synthetic derivative thereof that binds to the ABC or SLC superfamily of transporters.

[0386] In some embodiments, the muscle-targeting agent is any muscle targeting agents described herein (e.g., antibodies, nucleic acids, small molecules, peptides, aptamers, lipids, sugar moieties) that target SLC superfamily of transporters. In some embodiments, the muscle-targeting agent is a substrate of an SLC superfamily of transporters. SLC transporters are either equilibrative or use proton or sodium ion gradients created across the membrane to drive transport of substrates. Exemplary SLC transporters that have high skeletal muscle expression include, without limitation, the SATT transporter (ASCT1; SLC1A4), GLUT4 transporter (SLC2A4), GLUT7 transporter (GLUT7; SLC2A7), ATRC2 transporter (CAT-2; SLC7A2), LAT3 transporter (KIAA0245; SLC7A6), PHT1 transporter (PTR4; SLC15A4), OATP-J transporter (OATP5A1; SLC21A15), OCT3 transporter (EMT; SLC22A3), OCTN2 transporter (FLJ46769; SLC22A5), ENT transporters (ENT1; SLC29A1 and ENT2; SLC29A2), PAT2 transporter (SLC36A2), and SAT2 transporter (KIAA1382; SLC38A2). These transporters can facilitate the influx of substrates into skeletal muscle, providing opportunities for muscle targeting.

[0387] In some embodiments, the muscle-targeting agent is a substrate of an equilibrative nucleoside transporter 2 (ENT2) transporter. Relative to other transporters, ENT2 has one of the highest mRNA expressions in skeletal muscle. While human ENT2 (hENT2) is expressed in most body organs such as brain, heart, placenta, thymus, pancreas, prostate, and kidney, it is especially abundant in skeletal muscle. Human ENT2 facilitates the uptake of its substrates depending on their concentration gradient. ENT2 plays a role in maintaining nucleoside homeostasis by transporting a wide range of purine and pyrimidine nucleobases. The hENT2 transporter has a low affinity for all nucleosides (adenosine, guanosine, uridine, thymidine, and cytidine) except for inosine. Accordingly, in some embodiments, the muscle-targeting agent is an ENT2 substrate. Exemplary ENT2 substrates include, without limitation, inosine, 2′,3′-dideoxyinosine, and calofarabine. In some embodiments, any of the muscle-targeting agents provided herein are associated with a molecular payload (e.g., oligonucleotide payload). In some embodiments, the muscle-targeting agent is covalently linked to the molecular payload. In some embodiments, the muscle-targeting agent is non-covalently linked to the molecular payload.

[0388] In some embodiments, the muscle-targeting agent is a substrate of an organic cation/carnitine transporter (OCTN2), which is a sodium ion-dependent, high affinity carnitine transporter. In some embodiments, the muscle-targeting agent is carnitine, mildronate, acetylcarnitine, or any derivative thereof that binds to OCTN2. In some embodiments, the carnitine, mildronate, acetylcarnitine, or derivative thereof is covalently linked to the molecular payload (e.g., oligonucleotide payload).

[0389] A muscle-targeting agent may be a protein that is protein that exists in at least one soluble form that targets muscle cells. In some embodiments, a muscle-targeting protein may be hemojuvelin (also known as repulsive guidance molecule C or hemochromatosis type 2 protein), a protein involved in iron overload and homeostasis. In some embodiments, hemojuvelin may be full length or a fragment, or a mutant with at least 75%, at least 80%, at least 85%, at least 90%, at least 95%, at least 98% or at least 99% sequence identity to a functional hemojuvelin protein. In some embodiments, a hemojuvelin mutant may be a soluble fragment, may lack a N-terminal signaling, and/or lack a C-terminal anchoring domain. In some embodiments, hemojuvelin may be annotated under GenBank RefSeq Accession Numbers NM_001316767.1 (SEQ ID NO: 405), NM_145277.4 (SEQ ID NO: 406), NM_202004.3 (SEQ ID NO: 407), NM_213652.3 (SEQ ID NO: 408), or NM_213653.3 (SEQ ID NO: 409). It should be appreciated that a hemojuvelin may be of human, non-human primate, or rodent origin.

[0390] B. Molecular Payloads

[0391] Some aspects of the disclosure provide molecular payloads, e.g., for modulating a biological outcome, e.g., the transcription of a DNA sequence, the expression of a protein, or the activity of a protein. In some embodiments, a molecular payload is linked to, or otherwise associated with a muscle-targeting agent. In some embodiments, such molecular payloads are capable of targeting to a muscle cell, e.g., via specifically binding to a nucleic acid or protein in the muscle cell following delivery to the muscle cell by an associated muscle-targeting agent. It should be appreciated that various types of molecular payloads may be used in accordance with the disclosure. For example, the molecular payload may comprise, or consist of, an oligonucleotide (e.g., antisense oligonucleotide), a peptide (e.g., a peptide that binds a nucleic acid or protein associated with disease in a muscle cell), a protein (e.g., a protein that binds a nucleic acid or protein associated with disease in a muscle cell), or a small molecule (e.g., a small molecule that modulates the function of a nucleic acid or protein associated with disease in a muscle cell). In some embodiments, the molecular payload is an oligonucleotide that comprises a strand having a region of complementarity to a MSTN. In some embodiments, the molecular payload is an oligonucleotide that comprises a strand having a region of complementarity to an INHBA gene (e.g., INHBA DNA or INHBA RNA). In some embodiments, the molecular payload is an oligonucleotide that comprises a strand having a region of complementarity to ACVR1B. In some embodiments, the molecular payload is an oligonucleotide that comprises a strand having a region of complementarity to MLCK1. In some embodiments, the molecular payload is an oligonucleotide that comprises a strand having a region of complementarity to wild-type ACVR1. In some embodiments, the molecular payload is an oligonucleotide that comprises a strand having a region of complementarity to a mutant ACVR1 associated with FOP. In some embodiments, the molecular payload is an oligonucleotide that comprises a strand having a region of complementarity to FBXO32 (e.g., complementarity to NM_001242463.2 (SEQ ID NO: 655), NM_058229.4 (SEQ ID NO: 505), NM_148177.2 (SEQ ID NO: 656), XM_005564029.2 (SEQ ID NO: 657), NM_026346.3 (SEQ ID NO: 506), and/or NM_133521.1 (SEQ ID NO: 658)). In some embodiments, the molecular payload is an oligonucleotide that comprises a strand having a region of complementarity to TRIM63. In some embodiments, the molecular payload is an oligonucleotide that comprises a strand having a region of complementarity to a nucleic acid sequence encoding MEF2D, KLF15, MED1, MED13, or PPP1R3A (e.g., mRNA or DNA). In some embodiments, the molecular payload is an oligonucleotide that comprises a strand having a region of complementarity to the gene encoding MEF2D, KLF15, MED1, MED13, or PPP1R3A. In some embodiments, the molecular payload is an oligonucleotide that comprises a strand having a region of complementarity to a disease allele encoding MEF2D, KLF15, MED1, MED13, or PPP1R3A. In some embodiments, the molecular payload is a DNA decoy, e.g., of a MSTN, INHBA, ACVR1B, MLCK1, ACVR1, FBXO32, TRIM63, MEF2D, KLF15, MED1, MED13, or PPP1R3A nucleic acid. In some embodiments, two or more molecular payloads (e.g., targeting two or more genes) may be linked to a muscle targeting agent. As non-limiting examples, a complex may comprise molecular payloads targeting ACVR1B and MSTN; targeting ACVR1B and INHBA; targeting MSTN and INHBA; or targeting ACVR1B, MSTN and INHBA. Exemplary molecular payloads are described in further detail herein, however, it should be appreciated that the exemplary molecular payloads provided herein are not meant to be limiting.

[0392] i. Oligonucleotides

[0393] Any suitable oligonucleotide may be used as a molecular payload, as described herein. In some embodiments, the oligonucleotide may be designed to cause degradation of an mRNA (e.g., the oligonucleotide may be a gapmer, an siRNA, a ribozyme or an aptamer that causes degradation). In some embodiments, the oligonucleotide may be designed to promote or increase expression of a gene (e.g., MEF2D, KLF15, MED1, MED13, or PPP1R3A). In some embodiments, the oligonucleotide may be designed to block translation of an mRNA (e.g., the oligonucleotide may be a mixmer, an siRNA or an aptamer that blocks translation). In some embodiments, an oligonucleotide may be designed to caused degradation and block translation of an mRNA. In some embodiments, an oligonucleotide may be a guide nucleic acid (e.g., guide RNA) for directing activity of an enzyme (e.g., a gene editing enzyme). Other examples of oligonucleotides are provided herein. It should be appreciated that, in some embodiments, oligonucleotides in one format (e.g., antisense oligonucleotides) may be suitably adapted to another format (e.g., siRNA oligonucleotides) by incorporating functional sequences (e.g., antisense strand sequences) from one format to the other format. Oligonucleotides provided herein may be designed to modulate the expression or activity of target genes involved in muscle health, such as muscle growth and maintenance, including MSTN, INHBA and ACVR1B.

[0394] In some embodiments, the oligonucleotide is an antisense oligonucleotide (ASO). In some embodiments, the oligonucleotide is a siRNA. In some embodiments, the oligonucleotide is a short hairpin RNA. In some embodiments, the oligonucleotide is a miRNA-based shRNA. In some embodiments, the oligonucleotide is based on a shRNA based on any one of miR-92b-3p, miR-218, miR-18a, miR-1244, and miR-103, as described in Hu et al., Oncotarget. 2017 Nov. 3; 8(54): 92079-92089, and in Chen et al., Oncotarget. 2017 Dec. 19; 8(67): 112152-112165, incorporated herein by reference. In some embodiments, the oligonucleotide is based on a shRNA based on any one of miR-190a-5p, miR-223-3p, and miR-133.

[0395] In some embodiments, the oligonucleotide is a CRISPR guide RNA targeting MEF2D, KLF15, MED1, MED13, or PPP1R3A. In some embodiments, the oligonucleotide is a CRISPR guide RNA targeting KLF15 or a promoter region associated with KLF15 (e.g., to increase expression of KLF15).

[0396] a. MSTN Oligonucleotides

[0397] Examples of oligonucleotides useful for targeting MSTN are provided in Lu-Nguyen, N. et. al. “Functional muscle recovery following dystrophin and myostatin exon splice modulation in aged mdx mice” Human Molecular Genetics, Vol. 28, 18, 3091-3100 (2019); Liu, C. M. et. al. “Myostatin antisense RNA-mediated muscle growth in normal and cancer cachexia mice” Gene Therapy, Vol. 15, 155-160 (2008); Kang, J. K., “Antisense-induced myostatin exon skipping leads to muscle hypertrophy in mice following octa-guanidine morpholino oligomer treatment” Mol Ther. 2011 January; 19(1):159-64.; Kemaladewi, D. U. et. al. “Dual exon skipping in myostatin and dystrophin for Duchenne muscular dystrophy” BMC Med Genomics. 2011 Apr. 20; 4:36.; Tripathi, A. K. et. al. “Short hairpin RNA-induced myostatin gene silencing in caprine myoblast cells in vitro” Appl Biochem Biotechnol. 2013 January; 169(2):688-94.; Lu-Nguyen, N. et. al., “Systemic Antisense Therapeutics for Dystrophin and Myostatin Exon Splice Modulation Improve Muscle Pathology of Adult mdx Mice” Mol. Ther. Nucleic Acids. 2017 Mar. 17; 6:15-28.; U.S. Patent Application Publication 20050124566A1, published on Jun. 5, 2005, entitled “RNA interference mediated inhibition of myostatin gene expression using short interfering nucleic acid (siNA)”; U.S. Pat. No. 10,004,814, issued Jun. 26, 2018, entitled “Systemic delivery of myostatin short interfering nucleic acids (siNA) conjugated to a lipophilic moiety”; U.S. Patent Application Publication 20110166082A1, published on Jul. 7, 2011, entitled “Antisense composition and method for treating muscle atrophy”; U.S. Pat. No. 7,887,793, issued Feb. 15, 2011, entitled “Treatment of Duchenne muscular dystrophy with myoblasts expressing dystrophin and treated to block myostatin signaling”; and U.S. Patent Application Publication 20180355358A1, published on Dec. 13, 2018, entitled “Antisense-induced exon exclusion in myostatin”; the contents of each of which are incorporated herein in their entireties.

[0398] In some embodiments, an oligonucleotide that is useful for targeting MSTN is an oligonucleotide that promotes exon skipping of MSTN RNA sequences. In some embodiments, an oligonucleotide for targeting MSTN promotes exon skipping of exon 2. Skipping of exon 2 may lead to an improper out-of-phase splicing of exons 1 and 3. In some embodiments, an oligonucleotide for targeting MSTN targets a RNA splice junction, e.g., at intron 1/exon 2 or exon 2/intron 2.

[0399] Examples of oligonucleotides for promoting MSTN gene editing include Crispo, M. et. al. “Efficient Generation of Myostatin Knock-Out Sheep Using CRISPR/Cas9 Technology and Microinjection into Zygotes” PLoS One. 2015 Aug. 25; 10(8):e0136690; and Zhang, J. et. al. “Comparison of gene editing efficiencies of CRISPR/Cas9 and TALEN for generation of MSTN knock-out cashmere goats” Theriogenology. 2019 Jul. 1; 132:1-11.

[0400] In some embodiments, oligonucleotides may have a region of complementarity to a human MSTN gene sequence, for example, as provided below (Gene ID: 2660; NCBI Ref. No: NM_005259.3):

(SEQ ID NO. 147)
AGATTCACTGGTGTGGCAAGTTGTCTCTCAGACTGTACATGCATTAAAATTTTGCTTGGCATTA
CTCAAAAGCAAAAGAAAAGTAAAAGGAAGAAACAAGAACAAGAAAAAAGATTATATTGATTTTA
AAATCATGCAAAAACTGCAACTCTGTGTTTATATTTACCTGTTTATGCTGATTGTTGCTGGTCC
AGTGGATCTAAATGAGAACAGTGAGCAAAAAGAAAATGTGGAAAAAGAGGGGCTGTGTAATGCA
TGTACTTGGAGACAAAACACTAAATCTTCAAGAATAGAAGCCATTAAGATACAAATCCTCAGTA
AACTTCGTCTGGAAACAGCTCCTAACATCAGCAAAGATGTTATAAGACAACTTTTACCCAAAGC
TCCTCCACTCCGGGAACTGATTGATCAGTATGATGTCCAGAGGGATGACAGCAGCGATGGCTCT
TTGGAAGATGACGATTATCACGCTACAACGGAAACAATCATTACCATGCCTACAGAGTCTGATT
TTCTAATGCAAGTGGATGGAAAACCCAAATGTTGCTTCTTTAAATTTAGCTCTAAAATACAATA
CAATAAAGTAGTAAAGGCCCAACTATGGATATATTTGAGACCCGTCGAGACTCCTACAACAGTG
TTTGTGCAAATCCTGAGACTCATCAAACCTATGAAAGACGGTACAAGGTATACTGGAATCCGAT
CTCTGAAACTTGACATGAACCCAGGCACTGGTATTTGGCAGAGCATTGATGTGAAGACAGTGTT
GCAAAATTGGCTCAAACAACCTGAATCCAACTTAGGCATTGAAATAAAAGCTTTAGATGAGAAT
GGTCATGATCTTGCTGTAACCTTCCCAGGACCAGGAGAAGATGGGCTGAATCCGTTTTTAGAGG
TCAAGGTAACAGACACACCAAAAAGATCCAGAAGGGATTTTGGTCTTGACTGTGATGAGCACTC
AACAGAATCACGATGCTGTCGTTACCCTCTAACTGTGGATTTTGAAGCTTTTGGATGGGATTGG
ATTATCGCTCCTAAAAGATATAAGGCCAATTACTGCTCTGGAGAGTGTGAATTTGTATTTTTAC
AAAAATATCCTCATACTCATCTGGTACACCAAGCAAACCCCAGAGGTTCAGCAGGCCCTTGCTG
TACTCCCACAAAGATGTCTCCAATTAATATGCTATATTTTAATGGCAAAGAACAAATAATATAT
GGGAAAATTCCAGCGATGGTAGTAGACCGCTGTGGGTGCTCATGAGATTTATATTAAGCGTTCA
TAACTTCCTAAAACATGGAAGGTTTTCCCCTCAACAATTTTGAAGCTGTGAAATTAAGTACCAC
AGGCTATAGGCCTAGAGTATGCTACAGTCACTTAAGCATAAGCTACAGTATGTAAACTAAAAGG
GGGAATATATGCAATGGTTGGCATTTAACCATCCAAACAAATCATACAAGAAAGTTTTATGATT
TCCAGAGTTTTTGAGCTAGAAGGAGATCAAATTACATTTATGTTCCTATATATTACAACATCGG
CGAGGAAATGAAAGCGATTCTCCTTGAGTTCTGATGAATTAAAGGAGTATGCTTTAAAGTCTAT
TTCTTTAAAGTTTTGTTTAATATTTACAGAAAAATCCACATACAGTATTGGTAAAATGCAGGAT
TGTTATATACCATCATTCGAATCATCCTTAAACACTTGAATTTATATTGTATGGTAGTATACTT
GGTAAGATAAAATTCCACAAAAATAGGGATGGTGCAGCATATGCAATTTCCATTCCTATTATAA
TTGACACAGTACATTAACAATCCATGCCAACGGTGCTAATACGATAGGCTGAATGTCTGAGGCT
ACCAGGTTTATCACATAAAAAACATTCAGTAAAATAGTAAGTTTCTCTTTTCTTCAGGTGCATT
TTCCTACACCTCCAAATGAGGAATGGATTTTCTTTAATGTAAGAAGAATCATTTTTCTAGAGGT
TGGCTTTCAATTCTGTAGCATACTTGGAGAAACTGCATTATCTTAAAAGGCAGTCAAATGGTGT
TTGTTTTTATCAAAATGTCAAAATAACATACTTGGAGAAGTATGTAATTTTGTCTTTGGAAAAT
TACAACACTGCCTTTGCAACACTGCAGTTTTTATGGTAAAATAATAGAAATGATCGACTCTATC
AATATTGTATAAAAAGACTGAAACAATGCATTTATATAATATGTATACAATATTGTTTTGTAAA
TAAGTGTCTCCTTTTTTATTTACTTTGGTATATTTTTACACTAAGGACATTTCAAATTAAGTAC
TAAGGCACAAAGACATGTCATGCATCACAGAAAAGCAACTACTTATATTTCAGAGCAAATTAGC
AGATTAAATAGTGGTCTTAAAACTCCATATGTTAATGATTAGATGGTTATATTACAATCATTTT
ATATTTTTTTACATGATTAACATTCACTTATGGATTCATGATGGCTGTATAAAGTGAATTTGAA
ATTTCAATGGTTTACTGTCATTGTGTTTAAATCTCAACGTTCCATTATTTTAATACTTGCAAAA
ACATTACTAAGTATACCAAAATAATTGACTCTATTATCTGAAATGAAGAATAAACTGATGCTAT
CTCAACAATAACTGTTACTTTTATTTTATAATTTGATAATGAATATATTTCTGCATTTATTTAC
TTCTGTTTTGTAAATTGGGATTTTGTTAATCAAATTTATTGTACTATGACTAAATGAAATTATT
TCTTACATCTAATTTGTAGAAACAGTATAAGTTATATTAAAGTGTTTTCACATTTTTTTGAAAG
ACA

[0401] In some embodiments, oligonucleotides may have a region of complementarity to a mouse MSTN gene sequence, for example, as provided below (Gene ID: 17700; NCBI Ref. No: NM_010834.3):

(SEQ ID NO: 148)
AGGACTCCCTGGCGTGGCAGGTTGTCTCTCGGACGGTACATGCACTAATATTTCACTTGGCATT
ACTCAAAAGCAAAAAGAAGAAATAAGAACAAGGGAAAAAAAAAGATTGTGCTGATTTTTAAAAT
GATGCAAAAACTGCAAATGTATGTTTATATTTACCTGTTCATGCTGATTGCTGCTGGCCCAGTG
GATCTAAATGAGGGCAGTGAGAGAGAAGAAAATGTGGAAAAAGAGGGGCTGTGTAATGCATGTG
CGTGGAGACAAAACACGAGGTACTCCAGAATAGAAGCCATAAAAATTCAAATCCTCAGTAAGCT
GCGCCTGGAAACAGCTCCTAACATCAGCAAAGATGCTATAAGACAACTTCTGCCAAGAGCGCCT
CCACTCCGGGAACTGATCGATCAGTACGACGTCCAGAGGGATGACAGCAGTGATGGCTCTTTGG
AAGATGACGATTATCACGCTACCACGGAAACAATCATTACCATGCCTACAGAGTCTGACTTTCT
AATGCAAGCGGATGGCAAGCCCAAATGTTGCTTTTTTAAATTTAGCTCTAAAATACAGTACAAC
AAAGTAGTAAAAGCCCAACTGTGGATATATCTCAGACCCGTCAAGACTCCTACAACAGTGTTTG
TGCAAATCCTGAGACTCATCAAACCCATGAAAGACGGTACAAGGTATACTGGAATCCGATCTCT
GAAACTTGACATGAGCCCAGGCACTGGTATTTGGCAGAGTATTGATGTGAAGACAGTGTTGCAA
AATTGGCTCAAACAGCCTGAATCCAACTTAGGCATTGAAATCAAAGCTTTGGATGAGAATGGCC
ATGATCTTGCTGTAACCTTCCCAGGACCAGGAGAAGATGGGCTGAATCCCTTTTTAGAAGTCAA
GGTGACAGACACACCCAAGAGGTCCCGGAGAGACTTTGGGCTTGACTGCGATGAGCACTCCACG
GAATCCCGGTGCTGCCGCTACCCCCTCACGGTCGATTTTGAAGCCTTTGGATGGGACTGGATTA
TCGCACCCAAAAGATATAAGGCCAATTACTGCTCAGGAGAGTGTGAATTTGTGTTTTTACAAAA
ATATCCGCATACTCATCTTGTGCACCAAGCAAACCCCAGAGGCTCAGCAGGCCCTTGCTGCACT
CCGACAAAAATGTCTCCCATTAATATGCTATATTTTAATGGCAAAGAACAAATAATATATGGGA
AAATTCCAGCCATGGTAGTAGACCGCTGTGGGTGCTCATGAGCTTTGCATTAGGTTAGAAATTT
CCCAAGTCATGGAAGGTCTTCCCCTCAATTTCGAAACTGTGAATTCAAGCACCACAGGCTGTAG
GCCTTGAGTATGCTCTAGTAACGTAAGCACAAGCTACAGTGTATGAACTAAAAGAGAGAATAGA
TGCAATGGTTGGCATTCAACCACCAAAATAAACCATACTATAGGATGTTGTATGATTTCCAGAG
_{TTT}tTGAAATAGATGGAGATCAAATTACATTTATGTCCATATATGTATATTACAACTACAATCT
AGGCAAGGAAGTGAGAGCACATCTTGTGGTCTGCTGAGTTAGGAGGGTATGATTAAAAGGTAAA
GTCTTATTTCCTAACAGTTTCACTTAATATTTACGGAAGAATCTATATGTAGCCTTTGTAAAGT
GTAGGATTGTTATCATTTAAAAACATCATGTACACTTATATTTGTATTGTATACTTGGTAAGAT
AAAATTCCACAAAGTAGGAATGGGGCCTTACATACACATTGCCATTCCTATTATAATTGGACAA
TCCACCACGGTGCTAATGCAGTGCTGAATGGCTCCTACTGGACCTCTCGATAGAACACTCTACA
AAGTACGAGTCTCTCTCTCCCTTCCAGGTGCATCTCCACACACACAGCACTAAGTGTTCAATGC
ATTTTCTTTAAGGAAAGAAGAATCTTTTTTTCTAGAGGTCAACTTTCAGTCAACTCTAGCACAG
CGGGAGTGACTGCTGCATCTTAAAAGGCAGCCAAACAGTATTCATTTTTTAATCTAAATTTCAA
AATCACTGTCTGCCTTTATCACATGGCAATTTTGTGGTAAAATAATGGAAATGACTGGTTCTAT
CAATATTGTATAAAAGACTCTGAAACAATTACATTTATATAATATGTATACAATATTGTTTTGT
AAATAAGTGTCTCCTTTTATATTTACTTTGGTATATTTTTACACTAATGAAATTTCAAATCATT
AAAGTACAAAGACATGTCATGTATCACAAAAAAGGTGACTGCTTCTATTTCAGAGTGAATTAGC
AGATTCAATAGTGGTCTTAAAACTCTGTATGTTAAGATTAGAAGGTTATATTACAATCAATTTA
TGTATTTTTTACATTATCAACATTCACTTATGGTTTCATGGTGGCTGTATCTATGAATGTGGCT
CCCAGTCAAATTTCAATGCCCCACCATTTTAAAAATTACAAGCATTACTAAACATACCAACATG
TATCTAAAGAAATACAAATATGGTATCTCAATAACAGCTACTTTTTTATTTTATAATTTGACAA
TGAATACATTTCTTTTATTTACTTCAGTTTTATAAATTGGAACTTTGTTTATCAAATGTATTGT
ACTCATAGCTAAATGAAATTATTTCTTACATAAAAATGTGTAGAAACTATAAATTAAAGTGTTT
TCACATTTTTGAAAGGC

[0402] In some embodiments, the oligonucleotide may have region of complementarity to a mutant form of MSTN, for example as reported in as in Schuelke, M. et al., “Myostatin Mutation Associated with Gross Muscle Hypertrophy in a Child” N Engl J Med 2004; 350:2682-2688, the contents of which are incorporated herein by reference in its entirety.

[0403] In some embodiments, an oligonucleotide comprises a region of complementarity to an MSTN sequence as set forth in SEQ ID NO: 147 or SEQ ID NO: 148. In some embodiments, the oligonucleotide comprises a region of complementarity that is at least 80%, 85%, 90%, 95%, 96%, 97%, 98%, 99%, or 100% complementary to an MSTN sequence as set forth in SEQ ID NO: 147 or SEQ ID NO: 148. In some embodiments, the oligonucleotide comprises a sequence that has at least 10, 11, 12, 13, 14, 15, 16, 17, 18, or 19 consecutive nucleotides that are perfectly complementary to an MSTN sequence as set forth in SEQ ID NO: 147 or SEQ ID NO: 148. In some embodiments, an oligonucleotide may comprise a sequence that targets (e.g., is complementary to) an RNA version (i.e., wherein the T's are replaced with U's) of an MSTN sequence as set forth in SEQ ID NO: 147 or SEQ ID NO: 148. In some embodiments, the oligonucleotide comprises a sequence that is complementary (e.g., at least 80%, 85%, 90%, 95%, 96%, 97%, 98%, 99%, or 100% complementary) to an RNA version of an MSTN sequence as set forth in SEQ ID NO: 147 or SEQ ID NO: 148. In some embodiments, the oligonucleotide comprises a sequence that has at least 10, 11, 12, 13, 14, 15, 16, 17, 18, or 19 consecutive nucleotides that are perfectly complementary to an RNA version of an MSTN sequence as set forth in SEQ ID NO: 147 or SEQ ID NO: 148.

[0404] In some embodiments, an MSTN-targeting oligonucleotide comprises an antisense strand that comprises at least 10, 11, 12, 13, 14, 15, 16, 17, 18, or 19 consecutive nucleotides of a sequence comprising any one of SEQ ID NOs: 197-220. In some embodiments, an MSTN-targeting oligonucleotide comprises an antisense strand that comprises any one of SEQ ID NO: 197-220. In some embodiments, an oligonucleotide comprises an antisense strand that comprises shares at least 70%, 75%, 80%, 85%, 90%, 95%, or 97% sequence identity with at least 12 or at least 15 consecutive nucleotides of any one of SEQ ID NOs: 197-220.

[0405] In some embodiments, an MSTN-targeting oligonucleotide comprises an antisense strand that targets an MSTN sequence comprising any one of SEQ ID NO: 149-196. In some embodiments, an oligonucleotide comprises an antisense strand comprising at least 10, 11, 12, 13, 14, 15, 16, 17, 18, or 19 nucleotides (e.g., consecutive nucleotides) that are complementary to an MSTN sequence comprising any one of SEQ ID NO: 149-196. In some embodiments, an MSTN-targeting oligonucleotide comprises an antisense strand comprising a sequence that is at least 70%, 75%, 80%, 85%, 90%, 95%, or 97% complementary with at least 12 or at least 15 consecutive nucleotides of any one of SEQ ID NO: 149-196.

[0406] In some embodiments, an MSTN-targeting oligonucleotide comprises an antisense strand that comprises a region of complementarity to a target sequence as set forth in any one of SEQ ID NOs: 149-196. In some embodiments, the region of complementarity is at least 8, at least 9, at least 10, at least 11, at least 12, at least 13, at least 14, at least 15, at least 16, at least 17, or at least 19 nucleotides in length. In some embodiments, the region of complementarity is 8, 9, 10, 11, 12, 13, 14, 15, 16, 17, 18, or 19 nucleotides in length. In some embodiments, the region of complementarity is in the range of 8 to 20, 10 to 20 or 15 to 20 nucleotides in length. In some embodiments, the region of complementarity is fully complementary with all or a portion of its target sequence. In some embodiments, the region of complementarity includes 1, 2, 3 or more mismatches.

[0407] In some embodiments, an MSTN-targeting oligonucleotide further comprises a sense strand that hybridizes to the antisense strand to form a double stranded siRNA. In some embodiments, the MSTN-targeting oligonucleotide comprises an antisense strand that comprises the nucleotide sequence of any one of SEQ ID NOs: 197-220. In some embodiments, the MSTN-targeting oligonucleotide further comprises a sense strand that comprises the nucleotide sequence of any one of SEQ ID NOs: 173-196.

[0408] In some embodiments, the MSTN-targeting oligonucleotide is a double stranded oligonucleotide (e.g., an siRNA) comprising an antisense strand that comprises the nucleotide sequence of any one of SEQ ID NOs: 197-220 and a sense strand that hybridizes to the antisense strand and comprises the nucleotide sequence of any one of SEQ ID NOs: 173-196, wherein the antisense strand and/or (e.g., and) comprises one or more modified nucleosides (e.g., 2′-modified nucleosides). In some embodiment, the one or more modified nucleosides are selected from 2′-O-Me and 2′-F modified nucleosides.

[0409] In some embodiments, the MSTN-targeting oligonucleotide is a double stranded oligonucleotide (e.g., an siRNA) comprising an antisense strand that comprises the nucleotide sequence of any one of SEQ ID NOs: 197-220 and a sense strand that hybridizes to the antisense strand and comprises the nucleotide sequence of any one of SEQ ID NOs: 173-196, wherein each nucleoside in the antisense strand and/or (e.g., and) each nucleoside in the sense strand is a 2′-modified nucleoside selected from 2′-O-Me and 2′-F modified nucleosides.

[0410] In some embodiments, the MSTN-targeting oligonucleotide is a double stranded oligonucleotide (e.g., an siRNA) comprising an antisense strand that comprises the nucleotide sequence of any one of SEQ ID NOs: 197-220 and a sense strand that hybridizes to the antisense strand and comprises the nucleotide sequence of any one of SEQ ID NOs: 173-196, wherein each nucleoside in the antisense strand and each nucleoside in the sense strand is a 2′-modified nucleoside selected from 2′-O-Me and 2′-F modified nucleosides, and wherein the antisense strand and/or (e.g., and) the sense strand each comprises one or more phosphorothioate internucleoside linkages. In some embodiments, the sense strand does not comprise any phosphorothioate internucleoside linkages (all the internucleoside linkages in the sense strand are phosphodiester internucleoside linkages), and the antisense strand comprises 1, 2, or 3 phosphorothioate internucleoside linkages. In some embodiments, the antisense strand comprises 2 phosphorothioate internucleoside linkages, optionally wherein the two internucleoside linkages at the 3′ end of the antisense strand are phosphorothioate internucleoside linkages and the rest of the internucleoside linkages in the antisense strand are phosphodiester internucleoside linkages,

[0411] In some embodiments, the antisense strand of the MSTN-targeting oligonucleotide comprises a structure of (5′ to 3′): fNfNmNfNmNfNmNfNmNfNmNfNmNfNmNfNmNfNmNfNmN*fN*mN, wherein “mN” indicates 2′-O-methyl (2′-O-Me) modified nucleosides; “fN” indicates 2′-fluoro (2′-F) modified nucleosides; “*” indicates a phosphorothioate internucleoside linkage; and the absence of between two nucleosides indicates a phosphodiester internucleoside linkage.

[0412] In some embodiments, the sense strand of the MSTN-targeting oligonucleotide comprises a structure of (5′ to 3′): mNmNfNmNfNmNfNmNfNmNfNmNfNmNfNmNfNmNfNmNfN, wherein “mN” indicates 2′-O-methyl (2′-O-Me) modified nucleosides; “fN” indicates 2′-fluoro (2′-F) modified nucleosides; and the absence of “*” between two nucleosides indicates a phosphodiester internucleoside linkage.

[0413] In some embodiments, the antisense strand of the MSTN-targeting oligonucleotide is selected from the modified version of SEQ ID NOs: 197-220 listed in Table 10. In some embodiments, the sense strand of the MSTN-targeting oligonucleotide is selected from the modified version of SEQ ID NOs: 173-196 listed in Table 10. In some embodiments, the MSTN-targeting oligonucleotide is an siRNA selected from the siRNAs listed in Table 10.

TABLE 8
MSTN Target Sequences

| Corresponding | | |
|---|---|---|
| nucleotides | MSTN Target | |
| in NM_005259.3 | Sequence | SEQ |
| (SEQ ID NO: 300) | (5’ to 3’) | ID NO: |
| 448-466 | TTTGGAAGATGACGATTAT | 149 |
| 450-468 | TGGAAGATGACGATTATCA | 150 |
| 454-472 | AGATGACGATTATCACGCT | 151 |
| 482-500 | ACAATCATTACCATGCCTA | 152 |
| 630-644 | CTACAACAGTGTTTGTGCA | 153 |
| 632-650 | ACAACAGTGTTTGTGCAAA | 154 |
| 671-679 | ATGAAAGACGGTACAAGGT | 155 |
| 697-715 | AATCCGATCTCTGAAACTT | 156 |
| 699-717 | TCCGATCTCTGAAACTTGA | 157 |
| 754-772 | TGTGAAGACAGTGTTGCAA | 158 |
| 760-788 | GACAGTGTTGCAAAATTGG | 159 |
| 762-780 | CAGTGTTGCAAAATTGGCT | 160 |
| 766-784 | GTTGCAAAATTGGCTCAAA | 161 |
| 788-806 | CCTGAATCCAACTTAGGCA | 162 |
| 789-807 | CTGAATCCAACTTAGGCAT | 163 |
| 792-810 | AATCCAACTTAGGCATTGA | 164 |
| 793-811 | ATCCAACTTAGGCATTGAA | 165 |
| 846-864 | CTGTAACCTTCCCAGGACC | 166 |
| 865-883 | AGGAGAAGATGGGCTGAAT | 167 |
| 1181-1199 | ATGCTATATTTTAATGGCA | 168 |
| 1185-1203 | TATATTTTAATGGCAAAGA | 169 |
| 1201-1219 | AGAACAAATAATATATGGG | 170 |
| 1202-1220 | GAACAAATAATATATGGGA | 171 |
| 1203-1221 | AACAAATAATATATGGGAA | 172 |

*The target sequences contain Ts, but binding to RNA and/or DNA is contemplated.

[0414] In some embodiments, an oligonucleotide may comprise or consist of any sequence as provided in Table 9.

TABLE 9
Oligonucleotide sequences for targeting MSTN

| Passenger Strand/ | SEQ | Guide Strand/ | SEQ |
|---|---|---|---|
| Sense Strand (RNA) | ID | Antisense Strand | ID |
| (5′ to 3′) | NO: | (RNA) (5′ to 3′) | NO: |
| UCUUUGGAAGAUGACGAUUAU | 173 | AUAAUCGUCAUCUUCCAAAGAGC | 197 |
| UUUGGAAGAUGACGAUUAUCA | 174 | UGAUAAUCGUCAUCUUCCAAAGA | 198 |
| GAAGAUGACGAUUAUCACGCU | 175 | AGCGUGAUAAUCGUCAUCUUCCA | 199 |
| AAACAAUCAUUACCAUGCCUA | 176 | UAGGCAUGGUAAUGAUUGUUUCC | 200 |
| UCCUACAACAGUGUUUGUGCA | 177 | UGCACAAACACUGUUGUAGGAGU | 201 |
| CUACAACAGUGUUUGUGCAAA | 178 | UUUGCACAAACACUGUUGUAGGA | 202 |
| CUAUGAAAGACGGUACAAGGU | 179 | ACCUUGUACCGUCUUUCAUAGGU | 203 |
| GGAAUCCGAUCUCUGAAACUU | 180 | AAGUUUCAGAGAUCGGAUUCCAG | 204 |
| AAUCCGAUCUCUGAAACUUGA | 181 | UCAAGUUUCAGAGAUCGGAUUCC | 205 |
| GAUGUGAAGACAGUGUUGCAA | 182 | UUGCAACACUGUCUUCACAUCAA | 206 |
| AAGACAGUGUUGCAAAAUUGG | 183 | CCAAUUUUGCAACACUGUCUUCA | 207 |
| GACAGUGUUGCAAAAUUGGCU | 184 | AGCCAAUUUUGCAACACUGUCUU | 208 |
| GUGUUGCAAAAUUGGCUCAAA | 185 | UUUGAGCCAAUUUUGCAACACUG | 209 |
| AACCUGAAUCCAACUUAGGCA | 186 | UGCCUAAGUUGGAUUCAGGUUGU | 210 |
| ACCUGAAUCCAACUUAGGCAU | 187 | AUGCCUAAGUUGGAUUCAGGUUG | 211 |
| UGAAUCCAACUUAGGCAUUGA | 188 | UCAAUGCCUAAGUUGGAUUCAGG | 212 |
| GAAUCCAACUUAGGCAUUGAA | 189 | UUCAAUGCCUAAGUUGGAUUCAG | 213 |
| UGCUGUAACCUUCCCAGGACC | 190 | GGUCCUGGGAAGGUUACAGCAAG | 214 |
| CCAGGAGAAGAUGGGCUGAAU | 191 | AUUCAGCCCAUCUUCUCCUGGUC | 215 |
| AUAUGCUAUAUUUUAAUGGCA | 192 | UGCCAUUAAAAUAUAGCAUAUUA | 216 |
| GCUAUAUUUUAAUGGCAAAGA | 193 | UCUUUGCCAUUAAAAUAUAGCAU | 217 |
| AAAGAACAAAUAAUAUAUGGG | 194 | CCCAUAUAUUAUUUGUUCUUUGC | 218 |
| AAGAACAAAUAAUAUAUGGGA | 195 | UCCCAUAUAUUAUUUGUUCUUUG | 219 |
| AGAACAAAUAAUAUAUGGGAA | 196 | UUCCCAUAUAUUAUUUGUUCUUU | 220 |

[0415] In some embodiments, an oligonucleotide is a modified oligonucleotide as provided in Table 10, wherein ‘mN’ represents a 2′-O-methyl modified nucleoside (e.g., mU is 2′-O-methyl modified uridine), ‘fN’ represents a 2′-fluoro modified nucleoside (e.g., fU is 2′-fluoro modified uridine), ‘*’ represents a phosphorothioate internucleoside linkage, and lack of “*” between nucleosides indicate phosphodiester internucleoside linkage.

TABLE 10
Modified Oligonucleotides for targeting MSTN

| | Modified | | Modified | |
|---|---|---|---|---|
| | Passenger | | Guide | |
| | Strand/ | | Strand/ | |
| | Sense | | Antisense | |
| | Strand | SEQ | Strand | SEQ |
| | (RNA) | ID | (RNA) | ID |
| siRNA # | 5′ to ′3) | NO: | (5′ to 3′) | NO: |
| hsMSTN- | mUmCfUmUfUmGfGmAfA | 173 | fAfUmAfAmUfC | 197 |
| 1 | mGfAmUfGmAfCmGfAmU | | mGfUmCfAmUfC | |
| | fUmAfU | | mUfUmCfCmAfA | |
| | | | mAfGmA*fG*mC | |
| hsMSTN- | mUmUfUmGfGmAfAmGfA | 174 | fUfGmAfUmAfA | 198 |
| 5 | mUfGmAfCmGfAmUfUmA | | mUfCmGfUmCfA | |
| | fUmCfA | | mUfCmUfUmCfC | |
| | | | mAfAmA*fG*mA | |
| hsMSTN- | mGmAfAmGfAmUfGmAfC | 175 | fAfGmCfGmUfG | 199 |
| 2 | mGfAmUfUmAfUmCfAmCf | | mAfUmAfAmUfC | |
| | GmCfU | | mGfUmCfAmUfC | |
| | | | mUfUmC*fC*mA | |
| hsMSTN- | mAmAfAmCfAmAfUmCfA | 176 | fUfAmGfGmCfA | 200 |
| 6 | mUfUmAfCmCfAmUfGmCf | | mUfGmGfUmAfA | |
| | CmUfA | | mUfGmAfUmUfG | |
| | | | mUfUmU*fC*mC | |
| hsMSTN- | mUmCfCmUfAmCfAmAfC | 177 | fUfGmCfAmCfA | 201 |
| 7 | mAfGmUfGmUfUmUfGmU | | mAfAmCfAmCfU | |
| | fGmCfA | | mGfUmUfGmUfA | |
| | | | mGfGmA*fG*mU | |
| hsMSTN- | mCmUfAmCfAmAfCmAfG | 178 | fUfUmUfGmCfA | 202 |
| 8 | mUfGmUfUmUfGmUfGmC | | mCfAmAfAmCfA | |
| | fAmAfA | | mCfUmGfUmUfG | |
| | | | mUfAmG*fG*mA | |
| hsMSTN- | mCmUfAmUfGmAfAmAfG | 179 | fAfCmCfUmUfG | 203 |
| 9 | mAfCmGfGmUfAmCfAmAf | | mUfAmCfCmGfU | |
| | GmGfU | | mCfUmUfUmCfA | |
| | | | mUfAmG*fG*mU | |
| hsMSTN- | mGmGfAmAfUmCfCmGfA | 180 | fAfAmGfUmUfU | 204 |
| 10 | mUfCmUfCmUfGmAfAmAf | | mCfAmGfAmGfA | |
| | CmUfU | | mUfCmGfGmAfU | |
| | | | mUfCmC*fA*mG | |
| hsMSTN- | mAmAfUmCfCmGfAmUfC | 181 | fUfCmAfAmGfU | 205 |
| 11 | mUfCmUfGmAfAmAfCmUf | | mUfUmCfAmGfA | |
| | UmGfA | | mGfAmUfCmGfG | |
| | | | mAfUmU*fC*mC | |
| hsMSTN- | mGmAfUmGfUmGfAmAfG | 182 | fUfUmGfCmAfA | 206 |
| 12 | mAfCmAfGmUfGmUfUmG | | mCfAmCfUmGfU | |
| | fCmAfA | | mCfUmUfCmAfC | |
| | | | mAfUmC*fA*mA | |
| hsMSTN- | mAmAfGmAfCmAfGmUfG | 183 | fCfCmAfAmUfU | 207 |
| 13 | mUfUmGfCmAfAmAfAmU | | mUfUmGfCmAfA | |
| | fUmGfG | | mCfAmCfUmGfU | |
| | | | mCfUmU*fC*mA | |
| hsMSTN- | mGmAfCmAfGmUfGmUfU | 184 | fAfGmCfCmAfA | 208 |
| 3 | mGfCmAfAmAfAmUfUmG | | mUfUmUfUmGfC | |
| | fGmCfU | | mAfAmCfAmCfU | |
| | | | mGfUmC*fU*mU | |
| hsMSTN- | mGmUfGmUfUmGfCmAfA | 185 | fUfUmUfGmAfG | 209 |
| 4 | mAfAmUfUmGfGmCfUmCf | | mCfCmAfAmUfU | |
| | AmAfA | | mUfUmGfCmAfA | |
| | | | mCfAmC*fU*mG | |
| hsMSTN- | mAmAfCmCfUmGfAmAfU | 186 | fUfGmCfCmUfA | 210 |
| 14 | mCfCmAfAmCfUmUfAmGf | | mAfGmUfUmGfG | |
| | GmCfA | | mAfUmUfCmAfG | |
| | | | mGfUmU*fG*mU | |
| hsMSTN- | mAmCfCmUfGmAfAmUfC | 187 | fAfUmGfCmCfU | 211 |
| 15 | mCfAmAfCmUfUmAfGmGf | | mAfAmGfUmUfG | |
| | CmAfU | | mGfAmUfUmCfA | |
| | | | mGfGmU*fU*mG | |
| hsMSTN- | mUmGfAmAfUmCfCmAfA | 188 | fUfCmAfAmUfG | 212 |
| 16 | mCfUmUfAmGfGmCfAmUf | | mCfCmUfAmAfG | |
| | UmGfA | | mUfUmGfGmAfU | |
| | | | mUfCmA*fG*mG | |
| hsMSTN- | mGmAfAmUfCmCfAmAfC | 189 | fUfUmCfAmAfU | 213 |
| 17 | mUfUmAfGmGfCmAfUmU | | mGfCmCfUmAfA | |
| | fGmAfA | | mGfUmUfGmGfA | |
| | | | mUfUmC*fA*mG | |
| hsMSTN- | mUmGfCmUfGmUfAmAfC | 190 | fGfGmUfCmCfU | 214 |
| 18 | mCfUmUfCmCfCmAfGmGf | | mGfGmGfAmAfG | |
| | AmCfC | | mGfUmUfAmCfA | |
| | | | mGfCmA*fA*mG | |
| hsMSTN- | mCmCfAmGfGmAfGmAfA | 191 | fAfUmUfCmAfG | 215 |
| 19 | mGfAmUfGmGfGmCfUmG | | mCfCmCfAmUfC | |
| | fAmAfU | | mUfUmCfUmCfC | |
| | | | mUfGmG*fU*mC | |
| hsMSTN- | mAmUfAmUfGmCfUmAfU | 192 | fUfGmCfCmAfU | 216 |
| 20 | mAfUmUfUmUfAmAfUmG | | mUfAmAfAmAfU | |
| | fGmCfA | | mAfUmAfGmCfA | |
| | | | mUfAmU*fU*mA | |
| hsMSTN- | mGmCfUmAfUmAfUmUfU | 193 | fUfCmUfUmUfG | 217 |
| 21 | mUfAmAfUmGfGmCfAmA | | mCfCmAfUmUfA | |
| | fAmGfA | | mAfAmAfUmAfU | |
| | | | mAfGmC*fA*mU | |
| hsMSTN- | mAmAfAmGfAmAfCmAfA | 194 | fCfCmCfAmUfA | 218 |
| 22 | mAfUmAfAmUfAmUfAmU | | mUfAmUfUmAfU | |
| | fGmGfG | | mUfUmGfUmUfC | |
| | | | mUfUmU*fG*mC | |
| hsMSTN- | mAmAfGmAfAmCfAmAfA | 195 | fUfCmCfCmAfU | 219 |
| 23 | mUfAmAfUmAfUmAfUmG | | mAfUmAfUmUfA | |
| | fGmGfA | | mUfUmUfGmUfU | |
| | | | mCfUmU*fU*mG | |
| hsMSTN- | mAmGfAmAfCmAfAmAfU | 196 | fUfUmCfCmCfA | 220 |
| 24 | mAfAmUfAmUfAmUfGmG | | mUfAmUfAmUfU | |
| | fGmAfA | | mAfUmUfUmGfU | |
| | | | mUfCmU*fU*mU | |

[0416] b. INHBA Oligonucleotides

[0417] Examples of oligonucleotides useful for targeting INHBA are provided in Tada et. al., “Differential expression and cellular localization of activin and inhibin mRNA in the rainbow trout ovary and testis” Gen Comp Endocrinol. 2002 January; 125(1):142-9.; U.S. Pat. No. 10,260,068, issued on Apr. 16, 2019, and entitled “Prophylactic agent and therapeutic agent for fibrodysplasia ossificans progressiva”; Carlton, A L et. al. “Small molecule inhibition of the CBFβ/RUNX interaction decreases ovarian cancer growth and migration through alterations in genes related to epithelial-to-mesenchymal transition” Gynecol Oncol. 2018 May; 149(2):350-360.; and Takabe, K. et al. “Interruption of activin A autocrine regulation by antisense oligodeoxynucleotides accelerates liver tumor cell proliferation” Endocrinology. 1999 July; 140(7):3125-32.; the contents of each of which are incorporated herein in their entireties.

[0418] In some embodiments, oligonucleotides may have a region of complementarity to a human INHBA sequence, for example, as provided below (Gene ID: 3624; NCBI Ref. No: NM_002192.4):

(SEQ ID NO: 269)
ACAGTGCCAATACCATGAAGAGGAGCTCAGACAGCTCTTACCACATGATA
CAAGAGCCGGCTGGTGGAAGAGTGGGGACCAGAAAGAGAATTTGCTGAAG
AGGAGAAGGAAAAAAAAAACACCAAAAAAAAAAATAAAAAAATCCACACA
CACAAAAAAACCTGCGCGTGAGGGGGGAGGAAAAGCAGGGCCTTTTAAAA
AGGCAATCACAACAACTTTTGCTGCCAGGATGCCCTTGCTTTGGCTGAGA
GGATTTCTGTTGGCAAGTTGCTGGATTATAGTGAGGAGTTCCCCCACCCC
AGGATCCGAGGGGCACAGCGCGGCCCCCGACTGTCCGTCCTGTGCGCTGG
CCGCCCTCCCAAAGGATGTACCCAACTCTCAGCCAGAGATGGTGGAGGCC
GTCAAGAAGCACATTTTAAACATGCTGCACTTGAAGAAGAGACCCGATGT
CACCCAGCCGGTACCCAAGGCGGCGCTTCTGAACGCGATCAGAAAGCTTC
ATGTGGGCAAAGTCGGGGAGAACGGGTATGTGGAGATAGAGGATGACATT
GGAAGGAGGGCAGAAATGAATGAACTTATGGAGCAGACCTCGGAGATCAT
CACGTTTGCCGAGTCAGGAACAGCCAGGAAGACGCTGCACTTCGAGATTT
CCAAGGAAGGCAGTGACCTGTCAGTGGTGGAGCGTGCAGAAGTCTGGCTC
TTCCTAAAAGTCCCCAAGGCCAACAGGACCAGGACCAAAGTCACCATCCG
CCTCTTCCAGCAGCAGAAGCACCCGCAGGGCAGCTTGGACACAGGGGAAG
AGGCCGAGGAAGTGGGCTTAAAGGGGGAGAGGAGTGAACTGTTGCTCTCT
GAAAAAGTAGTAGACGCTCGGAAGAGCACCTGGCATGTCTTCCCTGTCTC
CAGCAGCATCCAGCGGTTGCTGGACCAGGGCAAGAGCTCCCTGGACGTTC
GGATTGCCTGTGAGCAGTGCCAGGAGAGTGGCGCCAGCTTGGTTCTCCTG
GGCAAGAAGAAGAAGAAAGAAGAGGAGGGGGAAGGGAAAAAGAAGGGCGG
AGGTGAAGGTGGGGCAGGAGCAGATGAGGAAAAGGAGCAGTCGCACAGAC
CTTTCCTCATGCTGCAGGCCCGGCAGTCTGAAGACCACCCTCATCGCCGG
CGTCGGCGGGGCTTGGAGTGTGATGGCAAGGTCAACATCTGCTGTAAGAA
ACAGTTCTTTGTCAGTTTCAAGGACATCGGCTGGAATGACTGGATCATTG
CTCCCTCTGGCTATCATGCCAACTACTGCGAGGGTGAGTGCCCGAGCCAT
ATAGCAGGCACGTCCGGGTCCTCACTGTCCTTCCACTCAACAGTCATCAA
CCACTACCGCATGCGGGGCCATAGCCCCTTTGCCAACCTCAAATCGTGCT
GTGTGCCCACCAAGCTGAGACCCATGTCCATGTTGTACTATGATGATGGT
CAAAACATCATCAAAAAGGACATTCAGAACATGATCGTGGAGGAGTGTGG
GTGCTCATAGAGTTGCCCAGCCCAGGGGGAAAGGGAGCAAGAGTTGTCCA
GAGAAGACAGTGGCAAAATGAAGAAATTTTTAAGGTTTCTGAGTTAACCA
GAAAAATAGAAATTAAAAACAAAACAAAAAAAAAAACAAAAAAAAACAAA
AGTAAATTAAAAACAAAACCTGATGAACAGATGAAGGAAGATGTGGAAAA
AATCCTTAGCCAGGGCTCAGAGATGAAGCAGTGAAAGAGACAGGAATTGG
GAGGGAAAGGGAGAATGGTGTACCCTTTATTTCTTCTGAAATCACACTGA
TGACATCAGTTGTTTAAACGGGGTATTGTCCTTTCCCCCCTTGAGGTTCC
CTTGTGAGCCTTGAATCAACCAATCTAGTCTGCAGTAGTGTGGACTAGAA
CAACCCAAATAGCATCTAGAAAGCCATGAGTTTGAAAGGGCCCATCACAG
GCACTTTCCTACCCAATTACCCAGGTCATAAGGTATGTCTGTGTGACACT
TATCTCTGTGTATATCAGCATACACACACACACACACACACACACACACA
CACACAGGCATTTCCACACATTACATATATACACATACTGGTAAAAGAAC
AATCGTGTGCAGGTGGTCACACTTCCTTTTTCTGTACCACTTTTGCAACA
AAACAAAACAAACAACATTAAAAAATTGAGAACAAGTATGGAAAGAATGA
AAGATCAAGGAAAAAAGAATACCAAGTTACATTTCGTTAAGGTGCTTATG
ATCTTAGAACTATGCAACCTAATAGGTTTGAAACTGTTTACCTGAGAGAG
AACAAAAAGAGAGACTTTTTTGTATTGGAAGTAATCTGATTAATTTTTAT
TTTCTTCAAGGAGAGATACTTGAAAGGAATATGTTTGTCCATCTGTTGGA
TCCAAACATTTCTATATTTTGTAAATGTTGTTGTTGTTTTTTTTTTAATC
GTTTACTATTTGCACTACAATGGTGTTTGACCTGTCTAATCCTTATTTAA
CAAGTATTTTCTTTGGTTGGGGGTGGGGGTGGGGTTTAAGAGCTGCACTT
AATGTGAGCTATAAAAGAACTGCTACAGCACACAAAATAGCTATTTTTAT
TATTATAATTATAATTATTATTATTATTTTGTACCTTAAAAAATAGACAC
ATACACCAAAGACATTTGTGTGAGCCTTTAAACAGTCTGTCTGTGGTTGG
TATCATTCACCATCAATGAGTCAGGGGTTGGGATTCAAGGTTGAGTAGTG
TGGATTGTGTTCAGGCTTAAAAGACCTGAGAAGTTTGGTTTTTGACTCCT
TTTACATCCATGAAACAGGACATTTCATACTGGATGTACAGTAGTTGTAC
ACTGTTGGATATCAAGTTCAATCAAATTCATGGAACTACATGCTTGTATG
TGTATATATACATTGCTTGTGCATATGCATATCTGTATGTATATATACAT
GTATTGTACCATGTCCATACACATTTTAAGCACTTCAGGCTGTCATTTTT
TAATGTTCTTAAAGCAATGAATGTTTGTGTGCAAAACACAGTATTTTTAA
GAAGGATAGGCTATAGTTTTTGCTTTTACTCTGAACTAGGTGGGCGCATT
TCAAAAATTCGGATGGGAAAAAGCCTGGAAATTCCAGTGAATATTCAGCA
AGGCCCTCTTTCATTGTACAGGGATCAAATTTCCTCCTCTTTTTTGTGCC
CCCTCCCACTTCTACAAGTTATCCCCTGTGGGGAAAACAGGATGATAATC
AAAACTCTGGGCTGATGTTTTTCCAACTTAGTGTCTATTGGAATCAATCT
TAAATCAGAAGCTTTTTCAGAAAAATAATATTTAGGCCAGAATTAGAGTT
GAGTGTATTTTTTAAAAATGATTAAGGCTTGGTTGTGAGAAATATTACCT
GTACCAGCTGGGAAAAATAATGTCATCACTAACTAAAAGATAATTAATTT
GAGAGAAAGTGTTAAGAGAGGGAGAGTAAGGAAGAGAACAGTTAAGAGGA
GGCAGAGGTGAGGGCAGTAGTAAAAATCTCTAAAATTTTAATTTACAGCC
AAAATTCTTCATGTGTAAATTTGTATTGATTCAGATGCAGAAATGAAAAA
AAAACACCTTTGTTTTATAAATATCAAAGTACATGCTTAAAGCCAAGTTT
TTATCTAGTTTATTCTAGTACTTAGCTTGCCTGGAATAGCTAATAAATTA
TTCATGTATGTGCTTTTGAAAATCCAGAGCCCTATTTTTACACACTTGTG
TGAAGTTGGCAAACATTTTGAAAAATGGAAAAAAGTTTCTAATAATTGGG
AACAATTACATTAATTAATATTTTGTAAAATATTGAAGCTTTTAGCCCTA
TGTCAATTTGTAGATTAAAATAAATTAATTATAGGAAAGGAAGATAACAG
TGAGAAACCAAACATTACAAAAGGTGGTTTAGCTCTCCTTGAAAAATATA
CTAAGTTGGTATACTATAACACTTGGCTATATGTAGGCAATGTCACTACT
GGGCAAATACACTTACTGTGTTCTAGAGGCAGCCCTTTCTTATGCAGAAA
ATACAATACGCACTGCATGAGAAGCTTGAGAGTGGATTCTAATCCAGGTC
TGTCGACCTTGGATATCATGCATGTGGGAAGGTGGGTGTGGTGAGAAAAG
TTTTAAGGCAAGAGTAGATGGCCATGTTCAACTTTACAAAATTTCTTGGA
AAACTGGCAGTATTTTGAACTGCATCTTCTTTGGTACCGGAACCTGCAGA
AACAGTGTGAGAAATTAAGTCCTGGTTCACTGCGCAGTAGCAAAGATGGT
CAAGGCCATGGAAAAAGCAGAAATTTACCAAGAAAGCTGATACCCATGTA
TAGTTCCCACTCATCTCAAATACATCTGCTATCTTTTTAAGCTAAGTCCT
AGACATATCGGGGATAACATGGGGGTTGATTAGTGACCACAGTTATCAGA
AGCAGAGAAATGTAATTCCATATTTTATTTGAAACTTATTCCATATTTTA
ATTGGATATTGAGTGATTGGGTTATCAAACACCCACAAACTTTAATTTTG
TTAAATTTATATGGCTTTGAAATAGAAGTATAAGTTGCTACCATTTTTTG
ATAACATTGAAAGATAGTATTTTACCATCTTTAATCATCTTGGAAAATAC
AAGTCCTGTGAACAACCACTCTTTCACCTAGCAGCATGAGGCCAAAAGTA
AAGGCTTTAAATTATAACATATGGGATTCTTAGTAGTATGTTTTTTTCTT
GAAACTCAGTGGCTCTATCTAACCTTACTATCTCCTCACTCTTTCTCTAA
GACTAAACTCTAGGCTCTTAAAAATCTGCCCACACCAATCTTAGAAGCTC
TGAAAAGAATTTGTCTTTAAATATCTTTTAATAGTAACATGTATTTTATG
GACCAAATTGACATTTTCGACTATTTTTTCCAAAAAAGTCAGGTGAATTT
CAGCACACTGAGTTGGGAATTTCTTATCCCAGAAGACCAACCAATTTCAT
ATTTATTTAAGATTGATTCCATACTCCGTTTTCAAGGAGAATCCCTGCAG
TCTCCTTAAAGGTAGAACAAATACTTTCTATTTTTTTTTCACCATTGTGG
GATTGGACTTTAAGAGGTGACTCTAAAAAAACAGAGAACAAATATGTCTC
AGTTGTATTAAGCACGGACCCATATTATCATATTCACTTAAAAAAATGAT
TTCCTGTGCACCTTTTGGCAACTTCTCTTTTCAATGTAGGGAAAAACTTA
GTCACCCTGAAAACCCACAAAATAAATAAAACTTGTAGATGTGGGCAGAA
GGTTTGGGGGTGGACATTGTATGTGTTTAAATTAAACCCTGTATCACTGA
GAAGCTGTTGTATGGGTCAGAGAAAATGAATGCTTAGAAGCTGTTCACAT
CTTCAAGAGCAGAAGCAAACCACATGTCTCAGCTATATTATTATTTATTT
TTTATGCATAAAGTGAATCATTTCTTCTGTATTAATTTCCAAAGGGTTTT
ACCCTCTATTTAAATGCTTTGAAAAACAGTGCATTGACAATGGGTTGATA
TTTTTCTTTAAAAGAAAAATATAATTATGAAAGCCAAGATAATCTGAAGC
CTGTTTTATTTTAAAACTTTTTATGTTCTGTGGTTGATGTTGTTTGTTTG
TTTGTTTCTATTTTGTTGGTTTTTTACTTTGTTTTTTGTTTTGTTTTGTT
TTGTTTTGCATACTACATGCAGTTCTTTAACCAATGTCTGTTTGGCTAAT
GTAATTAAAGTTGTTAATTTATATGAGTGCATTTCAACTATGTCAATGGT
TTCTTAATATTTATTGTGTAGAAGTACTGGTAATTTTTTTATTTACAATA
TGTTTAAAGAGATAACAGTTTGATATGTTTTCATGTGTTTATAGCAGAAG
TTATTTATTTCTATGGCATTCCAGCGGATATTTTGGTGTTTGCGAGGCAT
GCAGTCAATATTTTGTACAGTTAGTGGACAGTATTCAGCAACGCCTGATA
GCTTCTTTGGCCTTATGTTAAATAAAAAGACCTGTTTGGGATGTA.

[0419] In some embodiments, oligonucleotides may have a region of complementarity to a mouse INHBA sequence, for example, as provided by Gene ID: 16323; NCBI Ref. No: NM_008380.2:

(SEQ ID NO: 270)
GGGGTTCGCTAGTGGCTGCTCCTCCAGGCAGCACCGGGCCAGCGTGGAGT
TGGAGCTTTGTGAAGTAGCCAGTAAATCAGAACGCCTCCGCTAGGTGCAG
AGCGCGGTGGCAGCGGGCCACTCTGCCAGTGCGGTAGTCGGTGGGACCGA
ACTCTACACTCGGGAAGGGGCAGTCTGCGGGTGCGGGGCCTGAGCTGCCG
CTCGCCTCCGTTGGCCAGGAGACCGGCAGCCCCACTGCAGCTGCCAAAAG
GGGGGGAAAAATCAAGAGCTGCGCTTTTAAACGAAGTTGCCCTTGCTGGT
GTTCAGGGTAAAAATAGAGGCGGCCGCTTGGACCAGCTTGGCCCCTGAGT
CCAGGCGTCCCGCGAGCCGGGCTGGAGCTGCGCATTCGGGAGTGATCCCT
GGAAACTGCCAGCAGGTGCTGCTCAAGTGCCAATACCATGAAGAGGAATT
CAGACAGCTCTGACCTCATGAGACAAGAGCCGGCTGACAAAACAGAAGGG
ACCCGAAAGAGAATTTGCTGAAGAGGAGAAGGAAAAAAAAAGTCCAAAAA
AACCTGTGCGTGAGGGGTGGGGAGGAAAAGCAGGGCCTTTAAAGAAGGCA
ACCACACGACTTTTGCTGCCAGGATGCCCTTGCTTTGGCTGAGAGGATTT
CTGTTGGCAAGTTGCTGGATTATAGTGAGGAGTTCCCCCACCCCAGGATC
CGAGGGGCACGGCTCAGCCCCGGACTGCCCGTCCTGTGCGCTGGCCACCC
TTCCGAAGGATGGACCTAACTCTCAGCCAGAGATGGTAGAGGCTGTCAAG
AAGCACATCTTAAACATGCTGCACTTGAAGAAGAGACCCGATGTCACCCA
GCCGGTGCCCAAGGCGGCGCTTCTCAACGCGATCAGAAAGCTTCATGTGG
GTAAAGTGGGGGAGAACGGGTATGTGGAGATAGAGGACGACATTGGCAGG
AGGGCCGAAATGAATGAACTCATGGAGCAGACCTCGGAGATCATCACCTT
TGCCGAGTCAGGCACAGCCAGGAAGACACTGCACTTTGAGATTTCCAAGG
AAGGCAGTGACCTGTCAGTAGTGGAGCGTGCAGAAGTGTGGCTCTTCCTG
AAAGTCCCCAAGGCTAACAGAACCAGGACCAAAGTCACCATCCGTCTATT
TCAGCAGCAGAAGCACCCACAGGGCAGCTTGGACACGGGGGATGAGGCCG
AGGAAATGGGCTTAAAGGGGGAGAGGAGTGAACTGTTGCTATCAGAGAAA
GTAGTTGATGCTCGGAAGAGTACCTGGCACATCTTTCCAGTGTCCAGCAG
CATCCAGCGCCTGCTGGACCAGGGAAAGAGTTCCCTGGACGTGCGGATTG
CTTGTGAGCAGTGCCAGGAGAGTGGTGCCAGTCTAGTGCTTCTGGGCAAG
AAGAAGAAGAAAGAGGTGGATGGAGATGGGAAGAAGAAAGATGGGAGTGA
CGGAGGGCTGGAAGAGGAAAAGGAACAGTCACATAGACCTTTCCTCATGC
TGCAGGCTAGGCAGTCCGAAGACCACCCTCATCGCAGGCGTAGGCGGGGC
TTGGAGTGCGACGGCAAGGTCAACATTTGCTGTAAGAAACAGTTCTTTGT
CAGCTTCAAGGACATTGGCTGGAATGACTGGATCATTGCTCCCTCTGGCT
ATCACGCCAATTATTGTGAGGGGGAGTGCCCAAGCCACATAGCAGGCACC
TCTGGGTCCTCGCTCTCCTTCCACTCAACAGTCATTAACCACTACCGCAT
GAGGGGTCACAGCCCCTTTGCCAACCTTAAGTCATGCTGTGTGCCCACCA
AGCTGAGACCCATGTCCATGCTGTATTACGATGATGGTCAAAACATCATC
AAAAAGGACATTCAAAACATGATTGTGGAGGAGTGTGGCTGCTCCTAGAG
TCGCCAGGTCCCAGAGAAAATGGATCTAGAGAGTCCAGAGAAGACAGTGG
CAAAATGAAGAAAAAAATATAAGATTTATGAACTAAACAAAACAACCAGA
AAAATAGAAATAATAATAATAAAAAACCCACAAAAAAAAAACAAAAACAA
AAATCAAAAACTAAACTGAAAACAAGACCTAATGAAACAGATGAAGGAAG
ATGTGGAAAAATATCCTAAGGCAGGGCTCAGAGATGAAGCAGTAAAGGAG
ACAGGGATTGGGGGGGGGGAGGGGGGAGAAGAGAGAATGGTGTACCTTCA
TTTCTTCCAAAACCAAACTGATTGCATCAGTTTTATCCAAACTGGGTATT
GTCCTCTCTCCTGCCTCTTGCGGTTCCCTTGCGAGCCTGGAAGTCTACTT
GTCTATTCTGCAGTAATGTGGGTTAGCACAACCCAAATAATAATGTCTAG
AAAGCCATGAGTTTTAAAGGGCCAGTCCCACCCACTTACCCAGGTTATAA
GTATGTCTATGTGACACTATCTCTGTGTATTTCAACACACACACACACAC
ACACACACTCACACACACACACACACACACACACACACACACACACGCCC
CCCCACACACACACACACTCACACACACACACACACACACACACACACAC
ACACACACACTCACACACACACACACACACACACACGCCCACACACACAA
ACACAGAGGTGTTTCCACACACCACATGCATACACATACTGGTAAAAGAA
CAATTCTGTGCAGGTGGTCACATTTTCTTTTCTGTACCACTTTTGCCACC
AGACAAAACCAACATAAAACATTGAGAACAAGAGTGGAAAGAATGAAAGA
CCAAGGGAAGAAGAATACCAAGTTACATTTCGTTAAGGTGCTTTTGATCC
TAGAACTATGCAACCTAATAGGTTTGAAACTGTTTACCTGAAAGAGGACA
AAAAGAGAGACTTTTTTGTATTGGAAGTAACCTGATTAATTTTTATTTTC
TTCAAGGAGAGATACTTGAAAGGAATATGTTTGTCCATCTGTTGGATTCA
AACATTTCTATATTTTGTAAATGTTGTTTTTTTTATCGTTTACTATTTGC
ACTACGATGGTGTTTGACCTGTCTAATCCTTATTTAACAAGTATTTTCTT
TGGGTGGGGGTGGGGGTGGGGTTTAAGAGCTGCACTTCATGTGAGCTATA
AAAGAACTGCTACAGCACACAAAATAGCTATTTTTATTATTATAATTATA
ATTATTATTATTATTTTGTACCTTAAAAATAGACACATACACCAAAGACA
TTTGTGTGAGCCTTTAAACAGTCTGTCTGTGGTTGGTATTGTTCACCATC
AATGAGTCAGGGGTACAGATTTAAGGTTGAGTTAGGTAGATTGTGTTCAG
GCTTAAAAGACCTGAGAGGTTTGGGTTTTGACTCTTTTACATCCATGAAA
CAGGACATTTCATACTGGATGTACAGTAGTGTACACTGTTGGATTATCAA
GTTCAAATTCATGAGACTACATGCTTGTATGTGTATATATACATTGCTTG
TGCATATGCATATCTGTATGTATATATACATGTATTGTACCATGTCCATA
CACATTTTAAGCACTTCAGGCTGTCATTTTAAAAATGTTCTTAAAACAAT
GAATGTTTGTGTGCAAAACACAGTATTTTTAAGAAGGATAAGTGATAGAT
TTTTTTTTTTCTTGCTTTTACTCTGTAGTACGTGGGTACATTTCAAATGT
TAGGATGGGGAAAGACTGAAAATCCCAGTGAGTATCCAGCCAGGCCCTCT
TTAAATGTACAGGATGAAATCCCCTCTTTCATATCCCCCCTGCTCCCTAC
AAGTTATCCCCTGTGGGGAAAAATGGGATGTTACTTTAAAAACAAAATGG
GCTGATTTTTTCAACTTATATTTATTATTTATTGGAATCAATCTTAAATC
AGAAACATTTTTGGAAAAAATCTTTAGGCTAGAATAATTTTTTGAATAGT
GTTATTACTACTTAAATAATAAAATAAGCAGGAAAGTATTTAAGACAGTG
AGAGTTAAGGGAGAGAGCACTCAGGAGCCAGGGAGTTGTACAAATCTCTA
ATATTCTATTTTGCAGCCAAAAAACTTGCTGTGTATGTTTGTACTTTTTC
AGAGGCAAAACTGAAAAGATTGTCTTACGAATATCAAAATACACACTTAA
CCCAAGTTCCTAATTTAACCCAGTGTTGGCTTGTCTAAAACAGCTAATCA
GTTATTCATTTACATATTTAAAATATAGAGCCTTATTTTTACGGACTTGT
TTGAAGTTTGAAAAACTTTATAAAAGTGAAAAACTCTAATTGAAAAAAAA
TCTATATTCCTCAGTATTTTGTAAAATATTGAAGCTTTTAGCATTAAGTC
AGTCCATAGATTAAAGTCATTGTAGGAAAATGAAATACAAAGGAGAAATT
AAATCTTAAAAAAGCTGGTTTAACTCTTAAAAAAATAAACTAACTCAATA
TGTATTAAATATACCGTCAATATACCTTATCACATTAGGCTGTGTGTAGG
CAAACTACTTTAGTCTTGTTACTGGGCAAACATATTTACTGTGTTCCAGG
GGCCCTCCCTGTCTTATGCAGGAAATGCATGTACTGCATAAGAAATGAAT
TATAATTAAGGTCTAATGACCTTGAAGATCTCGCATGCGAGGACAGATGG
CATGTTGAGGACACAGAGGTGAGGTGGATGTCCAGGTTCAGCTTTGCCAA
TTTTTGTGAAAAACCTTTAGCGCCCTCTGAACTGTTTCTTTAGTATTGGA
GCTAATGCCGAGGCCTAGAGAAATAGTGGGCAAGAGATCTAACTGTGCCA
TATCAGAGATGATCTAGACCATGGGAAGAGCAGGATTTATGTAACTACTA
ATTATAGTTCTCATTCATCTGAGATGAATCTGCAATCTTCTTAAGCCCTT
TAAATTCTAGATGTTTTGAGGGTAAGCTTGGGTTTAATTAGTAGCCATAG
TAATTAAATCTAGAAAGAAATGAAATTCCACAGGACAGTGTATTTACTGG
AGACCAAGTGACTTGGTTGTCACATAAACCTCATCAGAACTCATCAAATT
TGTATGGCCTTGCAATAGAATTTAAATTGCTAATATTTTAACAATATTAG
ATATTGTTAACAATTTAGAAAACATGAAGTCTTGTGAACTGGTCTTTCTA
CATAAGTGCTTAATCCAAAATTTGAAAAGCCTTTAATGCTTAAGATCTTA
GTTTCTTCATGGTGTGCTTTCCCTAGTGTTAAAGTGGCTCTGTCTGGTCT
CCCCACTTTCTCTAGGATAATTCTTAAATACCTGCCCACACAAGTTCTAG
ATGCTCTGAAGAGCATTTGTAGTTAGTATCTCTTTAATACTTGTAAGCTT
CATTGACACTTTTCCTTCCCAAAATAAGTCAAATTTCAGCACAGCAATGG
GGATTTTCTTATCTTAGAAGACCAGCCAATTCTATGTTCATTTAAGATTG
ATTCCACACTCCATTTTCAAGGAGAGGCCTTGTGTTTTCTTAAAAGGCAG
AATAAGTAAAATTGGGAGCTATGCCAGACTGAACGCAAGACGTGACTTTG
TGATTCCAGAACAAACATGCCTCAGTTATAGTAACATGCATTCAAATGAT
TGTGTCACTTGAAAAATATGATTTCCTGTGGGCCTTTTGGCAACTTCTCT
ATTTTAGTATCGAGAAAAATGTAATCACCCCAAACCCGCATAAGTGTGAC
TTGTAGATGTGGGCAGGAGGTTGGGGGATGGACATTGTATGTGTTTAAAT
TAAACCCTGTATCACTGAGAAGCTATTGGAGGGGTCAGAGATAATGAATG
CATAGATGCTGTTCACATCTTCAAGAGCAAAAGCAAATCACGTGTCTCAG
CTATATTATTATTTATTTTTATGCATAAAGTGAATCATTTCTTCTGTATT
AATTTTCAGTGGGGTTTGCCCTCTATTTAAATGCTTTGAAAAACAGTGCA
TTGACAATGGTTGATATTTTTCTTTAAAAGAAAAATATAATTATGAAAGC
CAAGATAATCTGAAATCTGTTTTGATCTAAAACTTTTTATGTTATGTGGT
TGATGTTGTTTGTTTGTTTTTTATTTTTATTTTGTGAGTTCCTTTGCATA
CTACATGCAATTCTTTAACCAATGTCTGGCTAATGTAATTAAAGTTGTTA
ATTTATATGAGTGCATTTCAACTATGTCAATGGTTTCTTAATATTTATTT
TGTAGAAGTGCTGGTAATTTTTTATTTACGATATGTTTAAAGAGATAACG
GTTGGATATGTTTTCATGTGTTTATAGCAGAAGTTATTTATTTCTATTCC
ATTCCAGCGGATATTCTGATGTTTGCGAGGCATGCAGTCAATACTTTGTA
CAGTTAGTAGGCAGTATTCAGCAATGCCCGATAGCTTCTTTGGCCTTATG
TTAAATAAAAAGACCTGTTTGGGATGTAAAAAAAAAAAAAAAAAAAAAAA
AAA.

[0420] In some embodiments, an oligonucleotide comprises a region of complementarity to an INHBA sequence as set forth in SEQ ID NO: 269 or SEQ ID NO: 270. In some embodiments, the oligonucleotide comprises a region of complementarity that is at least 80%, 85%, 90%, 95%, 96%, 97%, 98%, 99%, or 100% complementary to an INHBA sequence as set forth in SEQ ID NO: 269 or SEQ ID NO: 270. In some embodiments, the oligonucleotide comprises a sequence that has at least 10, 11, 12, 13, 14, 15, 16, 17, 18, or 19 consecutive nucleotides that are perfectly complementary to an INHBA sequence as set forth in SEQ ID NO: 269 or SEQ ID NO: 270. In some embodiments, an oligonucleotide may comprise a sequence that targets (e.g., is complementary to) an RNA version (i.e., wherein the T's are replaced with U's) of an INHBA sequence as set forth in SEQ ID NO: 269 or SEQ ID NO: 270. In some embodiments, the oligonucleotide comprises a sequence that is complementary (e.g., at least 80%, 85%, 90%, 95%, 96%, 97%, 98%, 99%, or 100% complementary) to an RNA version of an INHBA sequence as set forth in SEQ ID NO: 269 or SEQ ID NO: 270. In some embodiments, the oligonucleotide comprises a sequence that has at least 10, 11, 12, 13, 14, 15, 16, 17, 18, or 19 consecutive nucleotides that are perfectly complementary to an RNA version of an INHBA sequence as set forth in SEQ ID NO: 269 or SEQ ID NO: 270.

[0421] In some embodiments, an INHBA-targeting oligonucleotide comprises an antisense strand that comprises at least 10, 11, 12, 13, 14, 15, 16, 17, 18, or 19 consecutive nucleotides of a sequence comprising any one of SEQ ID NOs: 319-342. In some embodiments, an INHBA-targeting oligonucleotide comprises an antisense strand that comprises any one of SEQ ID NO: 319-342. In some embodiments, an oligonucleotide comprises an antisense strand that comprises shares at least 70%, 75%, 80%, 85%, 90%, 95%, or 97% sequence identity with at least 12 or at least 15 consecutive nucleotides of any one of SEQ ID NOs: 319-342.

[0422] In some embodiments, an INHBA-targeting oligonucleotide comprises an antisense strand that targets an INHBA sequence comprising any one of SEQ ID NO: 271-318. In some embodiments, an oligonucleotide comprises an antisense strand comprising at least 10, 11, 12, 13, 14, 15, 16, 17, 18, or 19 nucleotides (e.g., consecutive nucleotides) that are complementary to an INHBA sequence comprising any one of SEQ ID NO: 271-318. In some embodiments, an INHBA-targeting oligonucleotide comprises an antisense strand comprising a sequence that is at least 70%, 75%, 80%, 85%, 90%, 95%, or 97% complementary with at least 12 or at least 15 consecutive nucleotides of any one of SEQ ID NO: 271-318.

[0423] In some embodiments, an INHBA-targeting oligonucleotide comprises an antisense strand that comprises a region of complementarity to a target sequence as set forth in any one of SEQ ID NOs: 271-318. In some embodiments, the region of complementarity is at least 8, at least 9, at least 10, at least 11, at least 12, at least 13, at least 14, at least 15, at least 16, at least 17, or at least 19 nucleotides in length. In some embodiments, the region of complementarity is 8, 9, 10, 11, 12, 13, 14, 15, 16, 17, 18, or 19 nucleotides in length. In some embodiments, the region of complementarity is in the range of 8 to 20, 10 to 20 or 15 to 20 nucleotides in length. In some embodiments, the region of complementarity is fully complementary with all or a portion of its target sequence. In some embodiments, the region of complementarity includes 1, 2, 3 or more mismatches.

[0424] In some embodiments, an INHBA-targeting oligonucleotide further comprises a sense strand that hybridizes to the antisense strand to form a double stranded siRNA. In some embodiments, the INHBA-targeting oligonucleotide comprises an antisense strand that comprises the nucleotide sequence of any one of SEQ ID NOs: 319-342. In some embodiments, the INHBA-targeting oligonucleotide further comprises a sense strand that comprises the nucleotide sequence of any one of SEQ ID NOs: 295-318.

[0425] In some embodiments, the INHBA-targeting oligonucleotide is a double stranded oligonucleotide (e.g., an siRNA) comprising an antisense strand that comprises the nucleotide sequence of any one of SEQ ID NOs: 319-342 and a sense strand that hybridizes to the antisense strand and comprises the nucleotide sequence of any one of SEQ ID NOs: 295-318, wherein the antisense strand and/or (e.g., and) comprises one or more modified nucleosides (e.g., 2′-modified nucleosides). In some embodiment, the one or more modified nucleosides are selected from 2′-O-Me and 2′-F modified nucleosides.

[0426] In some embodiments, the INHBA-targeting oligonucleotide is a double stranded oligonucleotide (e.g., an siRNA) comprising an antisense strand that comprises the nucleotide sequence of any one of SEQ ID NOs: 319-342 and a sense strand that hybridizes to the antisense strand and comprises the nucleotide sequence of any one of SEQ ID NOs: 295-318, wherein each nucleoside in the antisense strand and/or (e.g., and) each nucleoside in the sense strand is a 2′-modified nucleoside selected from 2′-O-Me and 2′-F modified nucleosides.

[0427] In some embodiments, the INHBA-targeting oligonucleotide is a double stranded oligonucleotide (e.g., an siRNA) comprising an antisense strand that comprises the nucleotide sequence of any one of SEQ ID NOs: 319-342 and a sense strand that hybridizes to the antisense strand and comprises the nucleotide sequence of any one of SEQ ID NOs: 295-318, wherein each nucleoside in the antisense strand and each nucleoside in the sense strand is a 2′-modified nucleoside selected from 2′-O-Me and 2′-F modified nucleosides, and wherein the antisense strand and/or (e.g., and) the sense strand each comprises one or more phosphorothioate internucleoside linkages. In some embodiments, the sense strand does not comprise any phosphorothioate internucleoside linkages (all the internucleoside linkages in the sense strand are phosphodiester internucleoside linkages), and the antisense strand comprises 1, 2, or 3 phosphorothioate internucleoside linkages. In some embodiments, the antisense strand comprises 2 phosphorothioate internucleoside linkages, optionally wherein the two internucleoside linkages at the 3′ end of the antisense strand are phosphorothioate internucleoside linkages and the rest of the internucleoside linkages in the antisense strand are phosphodiester internucleoside linkages,

[0428] In some embodiments, the antisense strand of the INHBA-targeting oligonucleotide comprises a structure of (5′ to 3′): fNfNmNfNmNfNmNfNmNfNmNfNmNfNmNfNmNfNmNfNmN*fN*mN, wherein “mN” indicates 2′-O-methyl (2′-O-Me) modified nucleosides; “fN” indicates 2′-fluoro (2′-F) modified nucleosides; “*” indicates a phosphorothioate internucleoside linkage; and the absence of “*” between two nucleosides indicates a phosphodiester internucleoside linkage.

[0429] In some embodiments, the sense strand of the INHBA-targeting oligonucleotide comprises a structure of (5′ to 3′): mNmNfNmNfNmNfNmNfNmNfNmNfNmNfNmNfNmNfNmNfN, wherein “mN” indicates 2′-O-methyl (2′-O-Me) modified nucleosides; “fN” indicates 2′-fluoro (2′-F) modified nucleosides; and the absence of “*” between two nucleosides indicates a phosphodiester internucleoside linkage.

[0430] In some embodiments, the antisense strand of the INHBA-targeting oligonucleotide is selected from the modified version of SEQ ID NOs: 319-342 listed in Table 13. In some embodiments, the sense strand of the INHBA-targeting oligonucleotide is selected from the modified version of SEQ ID NOs: 295-318 listed in Table 13. In some embodiments, the INHBA-targeting oligonucleotide is an siRNA selected from the siRNAs listed in Table 13.

TABLE 11
INHBA Target Sequences

| Corresponding | | |
|---|---|---|
| nucleotides of | | |
| Sequence | INHBA Target | SEQ |
| NM_002192.4 | Sequence | ID |
| (SEQ ID NO: 422) | (5′ to 3′) | NO: |
| 227-245 | AGGATGCCCTTGCTTTGGC | 271 |
| 228-246 | GGATGCCCTTGCTTTGGCT | 272 |
| 237-255 | TGCTTTGGCTGAGAGGATT | 273 |
| 246-264 | TGAGAGGATTTCTGTTGGC | 274 |
| 250-268 | AGGATTTCTGTTGGCAAGT | 275 |
| 252-270 | GATTTCTGTTGGCAAGTTG | 276 |
| 260-278 | TTGGCAAGTTGCTGGATTA | 277 |
| 261-279 | TGGCAAGTTGCTGGATTAT | 278 |
| 262-280 | GGCAAGTTGCTGGATTATA | 279 |
| 264-282 | CAAGTTGCTGGATTATAGT | 280 |
| 267-285 | GTTGCTGGATTATAGTGAG | 281 |
| 272-290 | TGGATTATAGTGAGGAGTT | 282 |
| 273-291 | GGATTATAGTGAGGAGTTC | 283 |
| 489-507 | TCAGAAAGCTTCATGTGGG | 284 |
| 521-539 | AACGGGTATGTGGAGATAG | 285 |
| 522-540 | ACGGGTATGTGGAGATAGA | 286 |
| 523-541 | CGGGTATGTGGAGATAGAG | 287 |
| 525-543 | GGTATGTGGAGATAGAGGA | 288 |
| 582-600 | AGCAGACCTCGGAGATCAT | 289 |
| 728-746 | ACCAGGACCAAAGTCACCA | 290 |
| 1191-1209 | GCTGTAAGAAACAGTTCTT | 291 |
| 1231-1249 | CTGGAATGACTGGATCATT | 292 |
| 1328-1346 | TCCTTCCACTCAACAGTCA | 293 |
| 1407-1425 | CCACCAAGCTGAGACCCAT | 294 |

* The target sequences contain Ts, but binding to RNA and/or DNA is contemplated.

[0431] In some embodiments, an oligonucleotide may comprise or consist of any sequence as provided in Table 12.

TABLE 12
Oligonucleotide sequences for targeting
INHBA

| Passenger Strand/ | | Guide Strand/ | |
|---|---|---|---|
| Sense Strand | SEQ | Antisense Strand | SEQ |
| (RNA) | ID | (RNA) | ID |
| (5′ to 3′) | NO: | (5′ to 3′) | NO: |
| CCAGGAUGCCCUUGCUUUGGC | 295 | GCCAAAGCAAGGGCAUCCUGGCA | 319 |
| CAGGAUGCCCUUGCUUUGGCU | 296 | AGCCAAAGCAAGGGCAUCCUGGC | 320 |
| CUUGCUUUGGCUGAGAGGAUU | 297 | AAUCCUCUCAGCCAAAGCAAGGG | 321 |
| GCUGAGAGGAUUUCUGUUGGC | 298 | GCCAACAGAAAUCCUCUCAGCCA | 322 |
| AGAGGAUUUCUGUUGGCAAGU | 299 | ACUUGCCAACAGAAAUCCUCUCA | 323 |
| AGGAUUUCUGUUGGCAAGUUG | 300 | CAACUUGCCAACAGAAAUCCUCU | 324 |
| UGUUGGCAAGUUGCUGGAUUA | 301 | UAAUCCAGCAACUUGCCAACAGA | 325 |
| GUUGGCAAGUUGCUGGAUUAU | 302 | AUAAUCCAGCAACUUGCCAACAG | 326 |
| UUGGCAAGUUGCUGGAUUAUA | 303 | UAUAAUCCAGCAACUUGCCAACA | 327 |
| GGCAAGUUGCUGGAUUAUAGU | 304 | ACUAUAAUCCAGCAACUUGCCAA | 328 |
| AAGUUGCUGGAUUAUAGUGAG | 305 | CUCACUAUAAUCCAGCAACUUGC | 329 |
| GCUGGAUUAUAGUGAGGAGUU | 306 | AACUCCUCACUAUAAUCCAGCAA | 330 |
| CUGGAUUAUAGUGAGGAGUUC | 307 | GAACUCCUCACUAUAAUCCAGCA | 331 |
| GAUCAGAAAGCUUCAUGUGGG | 308 | CCCACAUGAAGCUUUCUGAUCGC | 332 |
| AGAACGGGUAUGUGGAGAUAG | 309 | CUAUCUCCACAUACCCGUUCUCC | 333 |
| GAACGGGUAUGUGGAGAUAGA | 310 | UCUAUCUCCACAUACCCGUUCUC | 334 |
| AACGGGUAUGUGGAGAUAGAG | 311 | CUCUAUCUCCACAUACCCGUUCU | 335 |
| CGGGUAUGUGGAGAUAGAGGA | 312 | UCCUCUAUCUCCACAUACCCGUU | 336 |
| GGAGCAGACCUCGGAGAUCAU | 313 | AUGAUCUCCGAGGUCUGCUCCAU | 337 |
| GGACCAGGACCAAAGUCACCA | 314 | UGGUGACUUUGGUCCUGGUCCUG | 338 |
| CUGCUGUAAGAAACAGUUCUU | 315 | AAGAACUGUUUCUUACAGCAGAU | 339 |
| GGCUGGAAUGACUGGAUCAUU | 316 | AAUGAUCCAGUCAUUCCAGCCGA | 340 |
| UGUCCUUCCACUCAACAGUCA | 317 | UGACUGUUGAGUGGAAGGACAGU | 341 |
| GCCCACCAAGCUGAGACCCAU | 318 | AUGGGUCUCAGCUUGGUGGGCAC | 342 |

[0432] In some embodiments, an oligonucleotide is a modified oligonucleotide as provided in Table 13, wherein ‘mN’ represents a 2′-O-methyl modified nucleoside (e.g., mU is 2′-O-methyl modified uridine), ‘fN’ represents a 2′-fluoro modified nucleoside (e.g., fU is 2′-fluoro modified uridine), ‘*’ represents a phosphorothioate internucleoside linkage, and lack of “*” between nucleosides indicate phosphodiester internucleoside linkage.

TABLE 13
Modified Oligonucleotides for targeting INHBA

| siRNA # | Modified Passenger | | Modified Guide | |
|---|---|---|---|---|
| | Strand/Sense | SEQ | Strand/Antisense | SEQ |
| | Strand (RNA) | ID | Strand (RNA) | ID |
| | (5′ to 3′) | NO: | (5′ to 3′) | NO: |
| hsINHBA- | mCmCfAmGfGmAfUmGfC | 295 | fGfCmCfAmAfA | 319 |
| 4 | mCfCmUfUmGfCmUfUmU | | mGfCmAfAmGfG | |
| | fGmGfC | | mGfCmAfUmCfC | |
| | | | mUfGmG*fC*mA | |
| hsINHBA- | mCmAfGmGfAmUfGmCfC | 296 | fAfGmCfCmAfA | 320 |
| 5 | mCfUmUfGmCfUmUfUmG | | mAfGmCfAmAfG | |
| | fGmCfU | | mGfGmCfAmUfC | |
| | | | mCfUmG*fG*mC | |
| hsINHBA- | mCmUfUmGfCmUfUmUfG | 297 | fAfAmUfCmCfU | 321 |
| 6 | mGfCmUfGmAfGmAfGmG | | mCfUmCfAmGfC | |
| | fAmUfU | | mCfAmAfAmGfC | |
| | | | mAfAmG*fG*mG | |
| hsINHBA- | mGmCfUmGfAmGfAmGfG | 298 | fGfCmCfAmAfC | 322 |
| 7 | mAfUmUfUmCfUmGfUmU | | mAfGmAfAmAfU | |
| | fGmGfC | | mCfCmUfCmUfC | |
| | | | mAfGmC*fC*mA | |
| hsINHBA- | mAmGfAmGfGmAfUmUfU | 299 | fAfCmUfUmGfC | 323 |
| 8 | mCfUmGfUmUfGmGfCmA | | mCfAmAfCmAfG | |
| | fAmGfU | | mAfAmAfUmCfC | |
| | | | mUfCmU*fC*mA | |
| hsINHBA- | mAmGfGmAfUmUfUmCfU | 300 | fCfAmAfCmUfU | 324 |
| 9 | mGfUmUfGmGfCmAfAmG | | mGfCmCfAmAfC | |
| | fUmUfG | | mAfGmAfAmAfU | |
| | | | mCfCmU*fC*mU | |
| hsINHBA- | mUmGfUmUfGmGfCmAfA | 301 | fUfAmAfUmCfC | 325 |
| 10 | mGfUmUfGmCfUmGfGmA | | mAfGmCfAmAfC | |
| | fUmUfA | | mUfUmGfCmCfA | |
| | | | mAfCmA*fG*mA | |
| hsINHBA- | mGmUfUmGfGmCfAmAfG | 302 | fAfUmAfAmUfC | 326 |
| 11 | mUfUmGfCmUfGmGfAmU | | mCfAmGfCmAfA | |
| | fUmAfU | | mCfUmUfGmCfC | |
| | | | mAfAmC*fA*mG | |
| hsINHBA- | mUmUfGmGfCmAfAmGfU | 303 | fUfAmUfAmAfU | 327 |
| 12 | mUfGmCfUmGfGmAfUmU | | mCfCmAfGmCfA | |
| | fAmUfA | | mAfCmUfUmGfC | |
| | | | mCfAmA*fC*mA | |
| hsINHBA- | mGmGfCmAfAmGfUmUfG | 304 | fAfCmUfAmUfA | 328 |
| 1 | mCfUmGfGmAfUmUfAmU | | mAfUmCfCmAfG | |
| | fAmGfU | | mCfAmAfCmUfU | |
| | | | mGfCmC*fA*mA | |
| hsINHBA- | mAmAfGmUfUmGfCmUfG | 305 | fCfUmCfAmCfU | 329 |
| 2 | mGfAmUfUmAfUmAfGmU | | mAfUmAfAmUfC | |
| | fGmAfG | | mCfAmGfCmAfA | |
| | | | mCfUmU*fG*mC | |
| hsINHBA- | mGmCfUmGfGmAfUmUfA | 306 | fAfAmCfUmCfC | 330 |
| 13 | mUfAmGfUmGfAmGfGmA | | mUfCmAfCmUfA | |
| | fGmUfU | | mUfAmAfUmCfC | |
| | | | mAfGmC*fA*mA | |
| hsINHBA- | mCmUfGmGfAmUfUmAfU | 307 | fGfAmAfCmUfC | 331 |
| 14 | mAfGmUfGmAfGmGfAmG | | mCfUmCfAmCfU | |
| | fUmUfC | | mAfUmAfAmUfC | |
| | | | mCfAmG*fC*mA | |
| hsINHBA- | mGmAfUmCfAmGfAmAfA | 308 | fCfCmCfAmCfA | 332 |
| 15 | mGfCmUfUmCfAmUfGmU | | mUfGmAfAmGfC | |
| | fGmGfG | | mUfUmUfCmUfG | |
| | | | mAfUmC*fG*mC | |
| hsINHBA- | mAmGfAmAfCmGfGmGfU | 309 | fCfUmAfUmCfU | 333 |
| 16 | mAfUmGfUmGfGmAfGmA | | mCfCmAfCmAfU | |
| | fUmAfG | | mAfCmCfCmGfU | |
| | | | mUfCmU*fC*mC | |
| hsINHBA- | mGmAfAmCfGmGfGmUfA | 310 | fUfCmUfAmUfC | 334 |
| 17 | mUfGmUfGmGfAmGfAmU | | mUfCmCfAmCfA | |
| | fAmGfA | | mUfAmCfCmCfG | |
| | | | mUfUmC*fU*mC | |
| hsINHBA- | mAmAfCmGfGmGfUmAfU | 311 | fCfUmCfUmAfU | 335 |
| 18 | mGfUmGfGmAfGmAfUmA | | mCfUmCfCmAfC | |
| | fGmAfG | | mAfUmAfCmCfC | |
| | | | mGfUmU*fC*mU | |
| hsINHBA- | mCmGfGmGfUmAfUmGfU | 312 | fUfCmCfUmCfU | 336 |
| 19 | mGfGmAfGmAfUmAfGmA | | mAfUmCfUmCfC | |
| | fGmGfA | | mAfCmAfUmAfC | |
| | | | mCfCmG*fU*mU | |
| hsINHBA- | mGmGfAmGfCmAfGmAfC | 313 | fAfUmGfAmUfC | 337 |
| 20 | mCfUmCfGmGfAmGfAmU | | mUfCmCfGmAfG | |
| | fCmAfU | | mGfUmCfUmGfC | |
| | | | mUfCmC*fA*mU | |
| hsINHBA- | mGmGfAmCfCmAfGmGfA | 314 | fUfGmGfUmGfA | 338 |
| 21 | mCfCmAfAmAfGmUfCmA | | mCfUmUfUmGfG | |
| | fCmCfA | | mUfCmCfUmGfG | |
| | | | mUfCmC*fU*mG | |
| hsINHBA- | mCmUfGmCfUmGfUmAfA | 315 | fAfAmGfAmAfC | 339 |
| 3 | mGfAmAfAmCfAmGfUmU | | mUfGmUfUmUfC | |
| | fCmUfU | | mUfUmAfCmAfG | |
| | | | mCfAmG*fA*mU | |
| hsINHBA- | mGmGfCmUfGmGfAmAfU | 316 | fAfAmUfGmAfU | 340 |
| 22 | mGfAmCfUmGfGmAfUmC | | mCfCmAfGmUfC | |
| | fAmUfU | | mAfUmUfCmCfA | |
| | | | mGfCmC*fG*mA | |
| hsINHBA- | mUmGfUmCfCmUfUmCfC | 317 | fUfGmAfCmUfG | 341 |
| 23 | mAfCmUfCmAfAmCfAmG | | mUfUmGfAmGfU | |
| | fUmCfA | | mGfGmAfAmGfG | |
| | | | mAfCmA*fG*mU | |
| hsINHBA- | mGmCfCmCfAmCfCmAfA | 318 | fAfUmGfGmGfU | 342 |
| 24 | mGfCmUfGmAfGmAfCmC | | mCfUmCfAmGfC | |
| | fCmAfU | | mUfUmGfGmUfG | |
| | | | mGfGmC*fA*mC | |

[0433] c. ACVR1B Oligonucleotides

[0434] In some embodiments, the oligonucleotide is an antisense oligonucleotide (ASO). In some embodiments, the oligonucleotide is a siRNA. In some embodiments, the oligonucleotide is a short hairpin RNA. In some embodiments, the oligonucleotide is a miRNA-based shRNA (e.g., a shRNA based on miR-24, miR-210, miR-199a-5p). In some embodiments, the oligonucleotide is a CRISPR guide RNA targeting ACVR1B. Examples of oligonucleotides useful for targeting ACVR1B are provided in Katoh M., “Cardio-miRNAs and onco-miRNAs: circulating miRNA-based diagnostics for non-cancerous and cancerous diseases.” Front Cell Dev Biol. 2014 Oct. 16; 2:61.; Mizuno, Y. et al. “miR-210 promotes osteoblastic differentiation through inhibition of AcvR1b.” FEBS Lett. 2009 Jul. 7; 583(13):2263-8.; Lin, H. S. et al., “miR-199a-5p inhibits monocyte/macrophage differentiation by targeting the activin A type 1B receptor gene and finally reducing C/EBPα expression.” J Leukoc Biol. 2014 December; 96(6):1023-35.; International Patent Application Publication WO 2016/161477, entitled “A method of treating neoplasias”, filed on Mar. 23, 2016; and U.S. Patent Application Publication US 2014/0088174, entitled “Compounds and methods for altering activin receptor-like kinase signaling”, published on Mar. 27, 2014; the contents of each of which are incorporated herein in their entireties.

[0435] In some embodiments, oligonucleotides may have a region of complementarity to a human ACVR1B sequence, for example, as provided below (Gene ID: 91; NCBI Ref. No: NM_004302.5):

(SEQ ID NO: 367)
GGGCGCTGCTGGGCTGCGGCGGCGGCGGCGGCGGCGGTGGTTACTATGGC
GGAGTCGGCCGGAGCCTCCTCCTTCTTCCCCCTTGTTGTCCTCCTGCTCG
CCGGCAGCGGCGGGTCCGGGCCCCGGGGGGTCCAGGCTCTGCTGTGTGCG
TGCACCAGCTGCCTCCAGGCCAACTACACGTGTGAGACAGATGGGGCCTG
CATGGTTTCCATTTTCAATCTGGATGGGATGGAGCACCATGTGCGCACCT
GCATCCCCAAAGTGGAGCTGGTCCCTGCCGGGAAGCCCTTCTACTGCCTG
AGCTCGGAGGACCTGCGCAACACCCACTGCTGCTACACTGACTACTGCAA
CAGGATCGACTTGAGGGTGCCCAGTGGTCACCTCAAGGAGCCTGAGCACC
CGTCCATGTGGGGCCCGGTGGAGCTGGTAGGCATCATCGCCGGCCCGGTG
TTCCTCCTGTTCCTCATCATCATCATTGTTTTCCTTGTCATTAACTATCA
TCAGCGTGTCTATCACAACCGCCAGAGACTGGACATGGAAGATCCCTCAT
GTGAGATGTGTCTCTCCAAAGACAAGACGCTCCAGGATCTTGTCTACGAT
CTCTCCACCTCAGGGTCTGGCTCAGGGTTACCCCTCTTTGTCCAGCGCAC
AGTGGCCCGAACCATCGTTTTACAAGAGATTATTGGCAAGGGTCGGTTTG
GGGAAGTATGGCGGGGCCGCTGGAGGGGTGGTGATGTGGCTGTGAAAATA
TTCTCTTCTCGTGAAGAACGGTCTTGGTTCAGGGAAGCAGAGATATACCA
GACGGTCATGCTGCGCCATGAAAACATCCTTGGATTTATTGCTGCTGACA
ATAAAGATAATGGCACCTGGACACAGCTGTGGCTTGTTTCTGACTATCAT
GAGCACGGGTCCCTGTTTGATTATCTGAACCGGTACACAGTGACAATTGA
GGGGATGATTAAGCTGGCCTTGTCTGCTGCTAGTGGGCTGGCACACCTGC
ACATGGAGATCGTGGGCACCCAAGGGAAGCCTGGAATTGCTCATCGAGAC
TTAAAGTCAAAGAACATTCTGGTGAAGAAAAATGGCATGTGTGCCATAGC
AGACCTGGGCCTGGCTGTCCGTCATGATGCAGTCACTGACACCATTGACA
TTGCCCCGAATCAGAGGGTGGGGACCAAACGATACATGGCCCCTGAAGTA
CTTGATGAAACCATTAATATGAAACACTTTGACTCCTTTAAATGTGCTGA
TATTTATGCCCTCGGGCTTGTATATTGGGAGATTGCTCGAAGATGCAATT
CTGGAGGAGTCCATGAAGAATATCAGCTGCCATATTACGACTTAGTGCCC
TCTGACCCTTCCATTGAGGAAATGCGAAAGGTTGTATGTGATCAGAAGCT
GCGTCCCAACATCCCCAACTGGTGGCAGAGTTATGAGGCACTGCGGGTGA
TGGGGAAGATGATGCGAGAGTGTTGGTATGCCAACGGCGCAGCCCGCCTG
ACGGCCCTGCGCATCAAGAAGACCCTCTCCCAGCTCAGCGTGCAGGAAGA
CGTGAAGATCTAACTGCTCCCTCTCTCCACACGGAGCTCCTGGCAGCGAG
AACTACGCACAGCTGCCGCGTTGAGCGTACGATGGAGGCCTACCTCTCGT
TTCTGCCCAGCCCTCTGTGGCCAGGAGCCCTGGCCCGCAAGAGGGACAGA
GCCCGGGAGAGACTCGCTCACTCCCATGTTGGGTTTGAGACAGACACCTT
TTCTATTTACCTCCTAATGGCATGGAGACTCTGAGAGCGAATTGTGTGGA
GAACTCAGTGCCACACCTCGAACTGGTTGTAGTGGGAAGTCCCGCGAAAC
CCGGTGCATCTGGCACGTGGCCAGGAGCCATGACAGGGGCGCTTGGGAGG
GGCCGGAGGAACCGAGGTGTTGCCAGTGCTAAGCTGCCCTGAGGGTTTCC
TTCGGGGACCAGCCCACAGCACACCAAGGTGGCCCGGAAGAACCAGAAGT
GCAGCCCCTCTCACAGGCAGCTCTGAGCCGCGCTTTCCCCTCCTCCCTGG
GATGGACGCTGCCGGGAGACTGCCAGTGGAGACGGAATCTGCCGCTTTGT
CTGTCCAGCCGTGTGTGCATGTGCCGAGGTGCGTCCCCCGTTGTGCCTGG
TTCGTGCCATGCCCTTACACGTGCGTGTGAGTGTGTGTGTGTGTCTGTAG
TGGCGCACTTACCTGCTTGAGCTTTCTGTGCATGTGCAGGTCGGGGGTGT
GGTCGTCATGCTGTCCGTGCTTGCTGGTGCCTCTTTTCAGTAGTGAGCAG
CATCTAGTTTCCCTGGTGCCCTTCCCTGGAGGTCTCTCCCTCCCCCAGAG
CCCCTCATGCCACAGTGGTACTCTGTGTCTGGCAGGCTACTCTGCCCACC
CCAGCATCAGCACAGCTCTCCTCCTCCATCTCAGACTGTGGAACCAAAGC
TGGCCCAGTTGTCCATGACAAAAGAGGCTTTTGGGCCAAAATGTGAGGGT
GGTGGGTGGGATGGGCAGGGAAGGAATCCTGGTGGAAGTCTTGGGTGTTA
GTGTCAGCCATGGGAAATGAGCCAGCCCAAGGGCATCATCCTCAGCAGCA
TCGAGGAAGGGCCGAGGAATGTGAAGCCAGATCTCGGGACTCAGATTGGA
ATGTTACATCTGTCTTTCATCTCCCAGATCCTGGAAACAGCAGTGTATAT
TTTTGGTGGTGGTGGGTTTGGGGTGGGGAAGGGAAGGGCGGGCAAGGAGT
GGGGAGGGAGTCTGGGGTGGGAGGGAGGCATCTGCATGGGTCTTCTTTTA
CTGGACTGTCTGATCAGGGTGGAGGGAAGGTGAGAGGTTTGCATCCACTT
CAGGAGCCCTACTGAAGGGAACAGCCTGAGCCGAACATGTTATTTAACCT
GAGTATAGTATTTAACGAAGCCTAGAAGCACGGCTGTGGGTGGTGATTTG
GTCAGCATATCTTAGGTATATAATAACTTTGAAGCCATAACTTTTAACTG
GAGTGGTTTGATTTCTTTTTTTAATTTTATTGGGAGGGTTTGGATTTTAA
CTTTTTTTAATGTTGTTAAATATTAAGTTTTTGTAAAAGGAAAACCATCT
CTGTGATTACCTCTCAATCTATTTGTTTTTAAAGAAATCCCTAAAAAAAA
AAATTATCCAATTGAACGCACATAGCTCAATCACACTGGAAATGTTTGTC
CTTGCACCTGAGCCTGTTCCCACTCAGCAGTGAGAGTTCCTCTTTGCCCT
GAGGCTCAGTCTCTCTCGTATTTTGTCCCCACCCCCAATTCCTTGAGTGG
TTTTTGCTCTAGGGCCCTTTCTTGCACTGTCCAGCTGGTTGTACCCTCTC
CAGGCATTTATTCAACAAATGTGGGTGAAGTGCCTGCTGGGTGCCAGGTG
CTGGGAATACATCTGTGGACAAGACATGCTTGGGTCCTACTCCTGGAGCA
CTGTAAAAAGAGCTGATTCAAGTAAGTAGATGCCTGTTTTGAGACCAGAA
GGTTTCATAATTGGTTCTACGACCCTTTTGAGCCTAGAATTATTGTTCTT
ATATAAGATCACTGAAGAAAGAGGAACCCCCACAACCCCCTCCACAAAGA
GACCAGGGGCGGGTGATGAGACCTGGGGTTTAGAACCCCAGGTGAGACCT
CAAATCACTGCATTCATTCTGAGCCCCCTTCCTGTCCCCAGGGGAGGTGT
ATTGTGTATGTAGCCTTAGAGCATCTCTGCCTCCAACCCAGCAGTTCTCT
GCCAAAGCTTGTGGAGGAGGGAGAGCCCTGTCCCTGCCCTCAGGCTCCCC
AGTGCTCCTGGCCCTTCTATTTATTTGACTGATTATTGCTTCTTTCCTTG
CATTAAAGGAGATCTTCCCCTAACCTTTGGGCCAATTTACTGGCCACTAA
TTTCGTTTAAATACCATTGTGTCATTGGGGGGACCGTCTTTACCCCTGCT
GACCTCCCACCTATCCGCCCTGCAGCAGAACCTTGGCGGTTTATAGGTAA
TGATGGAACTTAGACTCCTCTTCCCAGAGTCACAAGTAGCCTCTGGGATC
TGCCAACACACGTCCACTCCCAAGCCACTAGCCCACTCCCCAGTTGGCCC
TTCTGCCCTTACCCCACACACAGTCCAACTCTTCCACCTCTGGGGAAGAT
GGAGCAGGTCTTTGGGAAGCTCCCACACCCACCTCTGCCACTCTTAACAC
TAAGTGAGAGTTGGGGAGAAACTGAAGCCGTGTTTTTGGCCCCCCGAGGC
TAACCCTGATCCATAGTGCTACCTGCACCTCTGGATTCTGGATTCACAGA
CCAAGTCCAAGCCCGTTCTTACGTCGCCATAAAGGCCCCCGAACGGCATT
CTCGGTACTTCTGTTTGTTTTTGTACATTTTATTAGAAAGGACTGTAAAA
TAGCCACTTAGACACTTTACCTCTTCAGTATGCAAATGTAAATAAATTGT
AATATAGGAAATCTTTTGTTTTAATATAAGAATGAGCCTGTCCAATTTCT
GCTGTACATTATTAAAAGTTTTATTCACAGA.

[0436] In some embodiments, oligonucleotides may have a region of complementarity to a human ACVR1B sequence, for example, as provided below (Gene ID: 91; NCBI Ref. No: NM_020328.4):

(SEQ ID NO: 368)
GGGCGCTGCTGGGCTGCGGCGGCGGCGGCGGCGGCGGTGGTTACTATGGC
GGAGTCGGCCGGAGCCTCCTCCTTCTTCCCCCTTGTTGTCCTCCTGCTCG
CCGGCAGCGGCGGGTCCGGGCCCCGGGGGGTCCAGGCTCTGCTGTGTGCG
TGCACCAGCTGCCTCCAGGCCAACTACACGTGTGAGACAGATGGGGCCTG
CATGGTTTCCATTTTCAATCTGGATGGGATGGAGCACCATGTGCGCACCT
GCATCCCCAAAGTGGAGCTGGTCCCTGCCGGGAAGCCCTTCTACTGCCTG
AGCTCGGAGGACCTGCGCAACACCCACTGCTGCTACACTGACTACTGCAA
CAGGATCGACTTGAGGGTGCCCAGTGGTCACCTCAAGGAGCCTGAGCACC
CGTCCATGTGGGGCCCGGTGGAGCTGGTAGGCATCATCGCCGGCCCGGTG
TTCCTCCTGTTCCTCATCATCATCATTGTTTTCCTTGTCATTAACTATCA
TCAGCGTGTCTATCACAACCGCCAGAGACTGGACATGGAAGATCCCTCAT
GTGAGATGTGTCTCTCCAAAGACAAGACGCTCCAGGATCTTGTCTACGAT
CTCTCCACCTCAGGGTCTGGCTCAGGGTTACCCCTCTTTGTCCAGCGCAC
AGTGGCCCGAACCATCGTTTTACAAGAGATTATTGGCAAGGGTCGGTTTG
GGGAAGTATGGCGGGGCCGCTGGAGGGGTGGTGATGTGGCTGTGAAAATA
TTCTCTTCTCGTGAAGAACGGTCTTGGTTCAGGGAAGCAGAGATATACCA
GACGGTCATGCTGCGCCATGAAAACATCCTTGGATTTATTGCTGCTGACA
ATAAAGCAGACTGCTCATTCCTCACATTGCCATGGGAAGTTGTAATGGTC
TCTGCTGCCCCCAAGCTGAGGAGCCTTAGACTCCAATACAAGGGAGGAAG
GGGAAGAGCAAGATTTTTATTCCCACTGAATAATGGCACCTGGACACAGC
TGTGGCTTGTTTCTGACTATCATGAGCACGGGTCCCTGTTTGATTATCTG
AACCGGTACACAGTGACAATTGAGGGGATGATTAAGCTGGCCTTGTCTGC
TGCTAGTGGGCTGGCACACCTGCACATGGAGATCGTGGGCACCCAAGGGA
AGCCTGGAATTGCTCATCGAGACTTAAAGTCAAAGAACATTCTGGTGAAG
AAAAATGGCATGTGTGCCATAGCAGACCTGGGCCTGGCTGTCCGTCATGA
TGCAGTCACTGACACCATTGACATTGCCCCGAATCAGAGGGTGGGGACCA
AACGATACATGGCCCCTGAAGTACTTGATGAAACCATTAATATGAAACAC
TTTGACTCCTTTAAATGTGCTGATATTTATGCCCTCGGGCTTGTATATTG
GGAGATTGCTCGAAGATGCAATTCTGGAGGAGTCCATGAAGAATATCAGC
TGCCATATTACGACTTAGTGCCCTCTGACCCTTCCATTGAGGAAATGCGA
AAGGTTGTATGTGATCAGAAGCTGCGTCCCAACATCCCCAACTGGTGGCA
GAGTTATGAGGCACTGCGGGTGATGGGGAAGATGATGCGAGAGTGTTGGT
ATGCCAACGGCGCAGCCCGCCTGACGGCCCTGCGCATCAAGAAGACCCTC
TCCCAGCTCAGCGTGCAGGAAGACGTGAAGATCTAACTGCTCCCTCTCTC
CACACGGAGCTCCTGGCAGCGAGAACTACGCACAGCTGCCGCGTTGAGCG
TACGATGGAGGCCTACCTCTCGTTTCTGCCCAGCCCTCTGTGGCCAGGAG
CCCTGGCCCGCAAGAGGGACAGAGCCCGGGAGAGACTCGCTCACTCCCAT
GTTGGGTTTGAGACAGACACCTTTTCTATTTACCTCCTAATGGCATGGAG
ACTCTGAGAGCGAATTGTGTGGAGAACTCAGTGCCACACCTCGAACTGGT
TGTAGTGGGAAGTCCCGCGAAACCCGGTGCATCTGGCACGTGGCCAGGAG
CCATGACAGGGGCGCTTGGGAGGGGCCGGAGGAACCGAGGTGTTGCCAGT
GCTAAGCTGCCCTGAGGGTTTCCTTCGGGGACCAGCCCACAGCACACCAA
GGTGGCCCGGAAGAACCAGAAGTGCAGCCCCTCTCACAGGCAGCTCTGAG
CCGCGCTTTCCCCTCCTCCCTGGGATGGACGCTGCCGGGAGACTGCCAGT
GGAGACGGAATCTGCCGCTTTGTCTGTCCAGCCGTGTGTGCATGTGCCGA
GGTGCGTCCCCCGTTGTGCCTGGTTCGTGCCATGCCCTTACACGTGCGTG
TGAGTGTGTGTGTGTGTCTGTAGGTGCGCACTTACCTGCTTGAGCTTTCT
GTGCATGTGCAGGTCGGGGGTGTGGTCGTCATGCTGTCCGTGCTTGCTGG
TGCCTCTTTTCAGTAGTGAGCAGCATCTAGTTTCCCTGGTGCCCTTCCCT
GGAGGTCTCTCCCTCCCCCAGAGCCCCTCATGCCACAGTGGTACTCTGTG
TCTGGCAGGCTACTCTGCCCACCCCAGCATCAGCACAGCTCTCCTCCTCC
ATCTCAGACTGTGGAACCAAAGCTGGCCCAGTTGTCCATGACAAAAGAGG
CTTTTGGGCCAAAATGTGAGGGTGGTGGGTGGGATGGGCAGGGAAGGAAT
CCTGGTGGAAGTCTTGGGTGTTAGTGTCAGCCATGGGAAATGAGCCAGCC
CAAGGGCATCATCCTCAGCAGCATCGAGGAAGGGCCGAGGAATGTGAAGC
CAGATCTCGGGACTCAGATTGGAATGTTACATCTGTCTTTCATCTCCCAG
ATCCTGGAAACAGCAGTGTATATTTTTGGTGGTGGTGGGTTTGGGGTGGG
GAAGGGAAGGGCGGGCAAGGAGTGGGGAGGGAGTCTGGGGTGGGAGGGAG
GCATCTGCATGGGTCTTCTTTTACTGGACTGTCTGATCAGGGTGGAGGGA
AGGTGAGAGGTTTGCATCCACTTCAGGAGCCCTACTGAAGGGAACAGCCT
GAGCCGAACATGTTATTTAACCTGAGTATAGTATTTAACGAAGCCTAGAA
GCACGGCTGTGGGTGGTGATTTGGTCAGCATATCTTAGGTATATAATAAC
TTTGAAGCCATAACTTTTAACTGGAGTGGTTTGATTTCTTTTTTTAATTT
TATTGGGAGGGTTTGGATTTTAACTTTTTTTAATGTTGTTAAATATTAAG
TTTTTGTAAAAGGAAAACCATCTCTGTGATTACCTCTCAATCTATTTGTT
TTTAAAGAAATCCCTAAAAAAAAAAATTATCCAATTGAACGCACATAGCT
CAATCACACTGGAAATGTTTGTCCTTGCACCTGAGCCTGTTCCCACTCAG
CAGTGAGAGTTCCTCTTTGCCCTGAGGCTCAGTCTCTCTCGTATTTTGTC
CCCACCCCCAATTCCTTGAGTGGTTTTTGCTCTAGGGCCCTTTCTTGCAC
TGTCCAGCTGGTTGTACCCTCTCCAGGCATTTATTCAACAAATGTGGGTG
AAGTGCCTGCTGGGTGCCAGGTGCTGGGAATACATCTGTGGACAAGACAT
GCTTGGGTCCTACTCCTGGAGCACTGTAAAAAGAGCTGATTCAAGTAAGT
AGATGCCTGTTTTGAGACCAGAAGGTTTCATAATTGGTTCTACGACCCTT
TTGAGCCTAGAATTATTGTTCTTATATAAGATCACTGAAGAAAGAGGAAC
CCCCACAACCCCCTCCACAAAGAGACCAGGGGCGGGTGATGAGACCTGGG
GTTTAGAACCCCAGGTGAGACCTCAAATCACTGCATTCATTCTGAGCCCC
CTTCCTGTCCCCAGGGGAGGTGTATTGTGTATGTAGCCTTAGAGCATCTC
TGCCTCCAACCCAGCAGTTCTCTGCCAAAGCTTGTGGAGGAGGGAGAGCC
CTGTCCCTGCCCTCAGGCTCCCCAGTGCTCCTGGCCCTTCTATTTATTTG
ACTGATTATTGCTTCTTTCCTTGCATTAAAGGAGATCTTCCCCTAACCTT
TGGGCCAATTTACTGGCCACTAATTTCGTTTAAATACCATTGTGTCATTG
GGGGGACCGTCTTTACCCCTGCTGACCTCCCACCTATCCGCCCTGCAGCA
GAACCTTGGCGGTTTATAGGTAATGATGGAACTTAGACTCCTCTTCCCAG
AGTCACAAGTAGCCTCTGGGATCTGCCAACACACGTCCACTCCCAAGCCA
CTAGCCCACTCCCCAGTTGGCCCTTCTGCCCTTACCCCACACACAGTCCA
ACTCTTCCACCTCTGGGGAAGATGGAGCAGGTCTTTGGGAAGCTCCCACA
CCCACCTCTGCCACTCTTAACACTAAGTGAGAGTTGGGGAGAAACTGAAG
CCGTGTTTTTGGCCCCCCGAGGCTAACCCTGATCCATAGTGCTACCTGCA
CCTCTGGATTCTGGATTCACAGACCAAGTCCAAGCCCGTTCTTACGTCGC
CATAAAGGCCCCCGAACGGCATTCTCGGTACTTCTGTTTGTTTTTGTACA
TTTTATTAGAAAGGACTGTAAAATAGCCACTTAGACACTTTACCTCTTCA
GTATGCAAATGTAAATAAATTGTAATATAGGAAATCTTTTGTTTTAATAT
GAAGAATGACCTGTCCAATTTCTGCTGTACATTATTAAAAGTTTTATTCA
CAGA.

[0437] In some embodiments, oligonucleotides may have a region of complementarity to a mouse ACVR1 sequence, for example, as provided below (Gene ID: 11479; NCBI Ref. No: NM_007395.4)

(SEQ ID NO: 369)
GAGGGAGGGAGGGAGAGAGGCGCCGGGGGCGCGCGCGCGCGCTGGGCGCT
GCTGGGCTGCGGCGGCGGTTACTATGGCGGAGTCGGCCGGAGCCTCCTCC
TTCTTCCCCCTTGTTGTCCTCCTGCTCGCCGGCAGCGGCGGGTCCGGGCC
CCGGGGGATCCAGGCTCTGCTGTGTGCGTGCACCAGCTGCCTACAGACCA
ACTACACCTGTGAGACAGATGGGGCTTGCATGGTCTCCATCTTTAACCTG
GATGGCGTGGAGCACCATGTACGTACCTGCATCCCCAAGGTGGAGCTGGT
TCCTGCTGGAAAGCCCTTCTACTGCCTGAGTTCAGAGGATCTGCGCAACA
CACACTGCTGCTATATTGACTTCTGCAACAAGATTGACCTCAGGGTCCCC
AGCGGACACCTCAAGGAGCCTGCGCACCCCTCCATGTGGGGCCCTGTGGA
GCTGGTCGGCATCATCGCCGGCCCCGTCTTCCTCCTCTTCCTTATCATTA
TCATCGTCTTCCTGGTCATCAACTATCACCAGCGTGTCTACCATAACCGC
CAGAGGTTGGACATGGAGGACCCCTCTTGCGAGATGTGTCTCTCCAAAGA
CAAGACGCTCCAGGATCTCGTCTACGACCTCTCCACGTCAGGGTCTGGCT
CAGGGTTACCCCTTTTTGTCCAGCGCACAGTGGCCCGAACCATTGTTTTA
CAAGAGATTATCGGCAAGGGCCGGTTCGGGGAAGTATGGCGTGGTCGCTG
GAGGGGTGGTGACGTGGCTGTGAAAATCTTCTCTTCTCGTGAAGAACGGT
CTTGGTTCCGTGAAGCAGAGATCTACCAGACCGTCATGCTGCGCCATGAA
AACATCCTTGGCTTTATTGCTGCTGACAATAAAGATAATGGCACCTGGAC
CCAGCTGTGGCTTGTCTCTGACTATCACGAGCATGGCTCACTGTTTGATT
ATCTGAACCGCTACACAGTGACCATTGAGGGAATGATTAAGCTAGCCTTG
TCTGCAGCCAGTGGTTTGGCACACCTGCATATGGAGATTGTGGGCACTCA
AGGGAAGCCGGGAATTGCTCATCGAGACTTGAAGTCAAAGAACATCCTGG
TGAAAAAAAATGGCATGTGTGCCATTGCAGACCTGGGCCTGGCTGTCCGT
CATGATGCGGTCACTGACACCATAGACATTGCTCCAAATCAGAGGGTGGG
GACCAAACGATACATGGCTCCTGAAGTCCTTGACGAGACAATCAACATGA
AGCACTTTGACTCCTTCAAATGTGCCGACATCTATGCCCTCGGGCTTGTC
TACTGGGAGATTGCACGAAGATGCAATTCTGGAGGAGTCCATGAAGACTA
TCAACTGCCGTATTACGACTTAGTGCCCTCCGACCCTTCCATTGAGGAGA
TGCGAAAGGTTGTATGTGACCAGAAGCTACGGCCCAATGTCCCCAACTGG
TGGCAGAGTTATGAGGCCTTGCGAGTGATGGGAAAGATGATGCGGGAGTG
CTGGTACGCCAATGGTGCTGCCCGTCTGACAGCTCTGCGCATCAAGAAGA
CTCTGTCCCAGCTAAGCGTGCAGGAAGATGTGAAGATTTAAGCTGTTCCT
CTGCCTACACAAAGAACCTGGGCAGTGAGGATGACTGCAGCCACCGTGCA
AGCGTCGTGGAGGCCTACCTCTTGTTTCTGCCCGGCCCTCTGGCCAGAGC
CCTGGCCTGCAAGAGGGACAGAGCCTGGGAGACGCGCACTCCCGTTGGGT
TTGAGACAGACACTTTTTATATTTACCTCCTGATGGCATGGAGACTCTGA
GCAAATCATGTAGACAACTCAATGCCACAACTCAAACTGCTTGCAGTGGG
AAGTACAGAGAGCCCAGTGCATCTGGCGTGTTGCCAGGAGCGGTGAAGGG
TGCTGGGCTCGCCCAGGAGCGGCCCCCATACCTTGTGGTCCACTGGGCTG
CAGGTTTTCCTCCAGGGACCAGTCAACTGGCATCAAGATATTGAGAGGAA
CCGGAAGTTTCCTCCCTCCTTCCCGTAGGCAGTCCTGAGCCACACCATCC
CTTCTCATGGACATCCGGAGGGACTGCCCCTAGAGACACAACCTGCTGCC
TGTCTGTCCAGCCAAGTGCGCATGTGCCGAGGTGTGTCCCACATTGTGCC
TGGTCTGTGCCACGCCCGTGTGTGTGTGTGTGTGTGTGAGTGAGTGTGTG
TGTGTACACTTAACCTGCTTGAGCTTTCTGTGCATGTGTAGGCCAGGGTG
TGGTGGCCATACTGTCTCTGAGTGCTGCTGCTTCTCAGTGAGCAGCATGT
AGTTAACCTGGTGCCCTCCTAGGTGTCTCCTGTCCCCAGACCCCATCAGT
CAGGGAGGTTCTGTCTTCTCAGCAGGCTGCTTGCCCACCCTGTGTCACAG
GCCCTCCTCTTCCATTTCAGACCAGAACCAAAGCTGGCCCACTTGTCCAT
GGTAGGAGAAGCTTTTGGGTCAAAATGAGGGGGACTTGATGAGCAGAGAG
AGAATGTAGGTGGAAGTCTTGGGTGCTGTGTTTCAGCATCAGCCATGGGA
AATGAGCCAGCCCAAGGGCATCTTCCTTGACAGCTGTGAGGAAGGGCCGA
GGAATCCGAAGCCAGAGCTTGGGACTCAGATTGGAATGTAACATCTGTTT
ATGTCCCACCCCAGATTCTGCAAACTGCAGTGTATATTTTTGGTGGTGGG
TTTGGGGTGGGAAGGGATGGGTTGCAGGGCGTGGGGAGGGAGGCTGGGGT
GGGAGGGAGGCATCTGCATGGGCTTCTTGTACTGGATTCTCTGATCAGGG
TAGAGAAGAGGCAAGGCTTGCATCCACTTCAGGGTCCCTACTGAGGAGAG
TGAGCGGTCCGAGCTGAATATGGTGTTTAACCTAAGTTTAGTATTTAATG
AATTCTAGAAGCCTGGCTGTGGGTGGTGATTTGGTCAGCATATCTTAGGT
ATATAATAACTTTGAAGCCATAACTTTTTAACTGGAGTGGTTTATTTTAA
TTCAGTTTATTTTATTTTATTTTGGGGGGAGGGTCAGGATTTTAACTTTA
ATATTGTTAAGTTTTGTAAAAGGAGAACCATCTCTGTGACAATTACCTCT
TAGTCTGTTTGTTTTTAAAGAAATCCCTAAAACAAACAAAACACAAAAAT
TCTCCAGACTCAAACGCACATAGTTCAGTCACTGGAAACGCTTGTCTTTG
CACCTGAGCCTGATCCCGCTGAGCAGTGAGGGCTGCTTTTCCCCATGGGG
GCTTGCTGTCTCGTACTCCCTGCACCCTCGGCCCCATCCCGTGAGCACCT
CGGCCCTCTGCACATTGCCCGGCTGGTTGGACCCTTTCCAGATACTTGCT
CAGCAAATGTGGGCTGCGAGCCTGCTGAGCGCTGGCCCGGGAGGATCTCC
TCAGGGTGGGGCAGGCTTGGGCGCTGCTCTGCTCCTCTACCACTGGAGGG
AATGGAATCATGCGATGGGCGAGCACCTGCTGTGGAGACCAGAAGTGCTC
ATGGCTGGTCCTGAGAGCCTTGATGAGCTAGGATCACTGTTCTTAAAGAC
CACTGAAACTGGAAGGGGGACCTGTATCCCCTTGGGAAGAGAAGCCCCTG
GCAAGCAGTGGGTCCTGGAGACTGGGTTCATTGTGAGCCTTTCCTGCCAG
GGGAGGCATGAGTCTTTGCAGGGAAACTGTCTCCTCCAGCTTCTCCTGCC
TTGGTCTCCCCATATTCTTAGCCTTTCTATTTATTTCCTGGTGTATAACT
TTCCTTGCTTTAAAGGGATCTTCCTTTAATTCCTTGGGCCAATTTACTGG
CCATTGAACAGTGTCCCTTGAGTCCCAACTGTGTCTCTGGGGAACCTCCT
TACCCACCCCTGCTGACCTCCCACTTCCCACCCTGCAGCTGAGTATCCGT
GATTACAGGCGATTGAACTGTAGAGTCCTCTCTGCCTCTGTACCTGCCAG
CAGCAGCCTCACAGTGACCCCCACGCCACTGGACAACTCCCAGGAGACCT
GTGCGCTCCGTGCAGCTCAGCTCAGCCGCCTCTCAGGAAGCCTGGAGCAG
GTCTGGGGGACCCCCCCCCCATCACTCTTTACATTAAGCTGAGAGTTGGG
AGAAGCTGTGCTTTGGCTCCCTGAGGCCACCCTGATCCACGGGGCACCCG
CACCTCTGCGTTCTGGATTCACAGACCAAGTCTAAAGCCCGTTCGTTCCT
GAGTTGCCGTCAAGGCCCCTGAACGGTACTCTCGGTACTTCTGTTTGTTT
TTTGTACAATTTATTAGAAAGGACTGTAAAATAGCCACTTAGACACTTTA
CCTCTCCAGTATGCAAATGTAAATATATTGTAATATAGGAAATTTTTGTT
TTAATATAAGAATGAGCCTGTCCAGTTTCTGCTGTACATTATTAAAGTTT
TATTCACAGAACTAAAAAAAAAAAAAAAAAAAAAAAA.

[0438] In some embodiments, oligonucleotides may have a region of complementarity to a rat ACVR1 sequence, for example, as provided below (Gene ID: 29381; NCBI Ref. No: NM_199230.1)

(SEQ ID NO: 370)
GGCGGCGGTTACTATGGCGGAGTCGGCCGGAGCCTCCTCCTTCTTCCCCC
TTGTTGTCCTCCTGCTCGCCGGCAGTGGCGGGTCCGGGCCCCGGGGGATC
CAGGCTCTGCTGTGTGCATGCACCAGCTGCCTACAGACCAACTACACCTG
CGAAACAGATGGGGCCTGCATGGTCTCCATCTTTAACCTGGATGGCATGG
AGCACCACGTACGCACCTGCATCCCCAAGGTGGAGCTTGTGCCTGCTGGG
AAGCCCTTCTACTGCCTGAGTTCAGAGGACCTGCGCAACACGCACTGCTG
CTATATTGACTTCTGCAACAAGATTGACCTGAGGGTGCCCAGTGGACACC
TCAAGGAGCCTGAGCACCCCTCCATGTGGGGCCCTGTGGAGCTGGTCGGC
ATCATTGCCGGTCCTGTCTTCCTCCTCTTCCTCATCATCATCATCGTCTT
CCTGGTCATCAACTATCATCAGCGTGTCTACCACAACCGCCAAAGACTGG
ACATGGAGGACCCCTCATGTGAGATGTGTCTCTCCAAAGACAAGACGCTC
CAGGATCTCGTCTACGATCTCTCCACTTCAGGATCGGGCTCAGGGTTACC
CCTTTTTGTCCAGCGCACAGTGGCCCGAACCATTGTTTTACAAGAGATTA
TCGGCAAGGGCCGGTTTGGGGAAGTATGGCGTGGCCGCTGGAGGGGTGGT
GATGTGGCTGTGAAAATCTTCTCTTCCCGTGAAGAGCGGTCGTGGTTCCG
GGAGGCAGAGATCTACCAGACTGTCATGCTGCGCCATGAAAACATCCTTG
GGTTTATTGCTGCTGACAATAAAGACAATGGCACCTGGACCCAGCTGTGG
CTTGTCTCTGACTATCACGAGCACGGCTCACTGTTCGATTATCTGAACCG
CTACACAGTGACCATTGAGGGGATGATTAAACTGGCCCTGTCTGCAGCCA
GTGGTTTGGCACACCTGCATATGGAGATTGTGGGCACTCAGGGGAAGCCT
GGAATTGCTCATCGAGACTTGAAGTCAAAGAACATTCTGGTGAAGAAGAA
TGGCATGTGTGCCATTGCAGACCTGGGCCTAGCTGTCCGTCACGATGCTG
TCACTGACACCATAGACATTGCTCCAAATCAGAGGGTGGGAACCAAACGA
TACATGGCTCCTGAAGTACTTGACGAGACCATCAACATGAAGCACTTTGA
CTCCTTCAAGTGTGCCGATATCTACGCCCTCGGGCTTGTCTATTGGGAGA
TTGCTCGGAGGTGCAATTCTGGAGGAGTCCATGAAGAGTATCAACTGCCA
TATTATGATTTAGTGCCCTCTGACCCTTCCATTGAGGAAATGCGAAAGGT
CGTCTGTGACCAGAAGCTACGGCCCAATGTCCCCAACTGGTGGCAGAGTT
ATGAGGCCTTGCGAGTGATGGGGAAGATGATGCGGGAGTGCTGGTACGCC
AATGGTGCTGCCCGCCTGACAGCGCTGCGCATCAAGAAGACTTTGTCCCA
GCTAAGCGTGCAGGAAGACGTGAAGATTTAAGCTGTTCCTCTGCCTACGC
AAAGAACCTGGGCAGTGAGGATGCCTGCAGCCACCGTGCAAGCGTGGAGG
CCTACCTCTTGTTTCTGCCCAGCCCTCTGGCCAGAGCCCTGGTCTGCAAG
AGGGACAGAGCCTGGGAGACGCACACTCCCTACTGGGTTTGAGACAGACA
CTTTTTATATTTACCTCCTGATGGCATGGAGACTCTGAGAGCAAATCATG
TAGATGACTCGATGCCACAACTCGCACTGCGTGCAGTGGGAAGGACAGAA
AGCCCAGTGCATCTGGCATGTTGCCAGGAGTGGTGATGGGTGCTGGGCTC
GCCTGGGAGCAGCCCCCATACCGTGTTGTCCACTGGACTGCAGGTTTCCT
CCAGGGACCAGTCAACTGGCAGATACTGAGAGGAACCGGAAGTGTCCTCC
CTTTTACCTGTGGGCAGTCCTGAGCCACGCCATCCCCTTCTCATCTGGAG
GACCGCCCCTAGAGACACAACCTGCTGCCTGTCTGTCCAGCCAAGTGCGC
ATGTGCCGAGGTGTGTCTCACATTGTGCCTGGTCCGTGCCTCGCCCGTGT
GTGTGTGTGTGTGTGTGTGTATGTGTGTGTGTAGGTGTGTGTGAGTGTGT
GTGTTAGTGTAGGTGTGTGAGAGTGTGTGTGTAGGTGTGTGAGTGTGGGT
GTGTGAGAGTGTGTGTAGGTGTATGTGAGTGTGTAAGTGTGTGTAGGTGT
GTGAGTGTGTAGGTGTGTGAGTGTG

[0439] In some embodiments, the oligonucleotide may have a region of complementarity to a mutant form of ACVR1B, for example as reported in Su, G. H. et al. Proc Natl Acad Sci USA. 2001 Mar. 13; 98(6): 3254-3257., the contents of which are incorporated herein by reference in their entirety.

[0440] In some embodiments, an oligonucleotide comprises a region of complementarity to an ACVR1B sequence as set forth in SEQ ID NO: 367, SEQ ID NO: 368, SEQ ID NO: 369, or SEQ ID NO: 370. In some embodiments, the oligonucleotide comprises a region of complementarity that is at least 80%, 85%, 90%, 95%, 96%, 97%, 98%, 99%, or 100% complementary to an ACVR1B sequence as set forth in SEQ ID NO: 367, SEQ ID NO: 368, SEQ ID NO: 369, or SEQ ID NO: 370. In some embodiments, the oligonucleotide comprises a sequence that has at least 10, 11, 12, 13, 14, 15, 16, 17, 18, or 19 consecutive nucleotides that are perfectly complementary to an ACVR1B sequence as set forth in SEQ ID NO: 367, SEQ ID NO: 368, SEQ ID NO: 369, or SEQ ID NO: 370. In some embodiments, an oligonucleotide may comprise a sequence that targets (e.g., is complementary to) an RNA version (i.e., wherein the T's are replaced with U's) of an ACVR1B sequence as set forth in SEQ ID NO: 367, SEQ ID NO: 368, SEQ ID NO: 369, or SEQ ID NO: 370. In some embodiments, the oligonucleotide comprises a sequence that is complementary (e.g., at least 80%, 85%, 90%, 95%, 96%, 97%, 98%, 99%, or 100% complementary) to an RNA version of an ACVR1B sequence as set forth in SEQ ID NO: 367, SEQ ID NO: 368, SEQ ID NO: 369, or SEQ ID NO: 370. In some embodiments, the oligonucleotide comprises a sequence that has at least 10, 11, 12, 13, 14, 15, 16, 17, 18, or 19 consecutive nucleotides that are perfectly complementary to an RNA version of an ACVR1B sequence as set forth in SEQ ID NO: 367, SEQ ID NO: 368, SEQ ID NO: 369, or SEQ ID NO: 370.

[0441] In some embodiments, an ACVR1B-targeting oligonucleotide comprises an antisense strand that comprises at least 10, 11, 12, 13, 14, 15, 16, 17, 18, or 19 consecutive nucleotides of a sequence comprising any one of SEQ ID NOs: 343-366. In some embodiments, an ACVR1B-targeting oligonucleotide comprises an antisense strand that comprises any one of SEQ ID NO: 343-366. In some embodiments, an oligonucleotide comprises an antisense strand that comprises shares at least 70%, 75%, 80%, 85%, 90%, 95%, or 97% sequence identity with at least 12 or at least 15 consecutive nucleotides of any one of SEQ ID NOs: 343-366.

[0442] In some embodiments, an ACVR1B-targeting oligonucleotide comprises an antisense strand that targets an ACVR1B sequence comprising any one of SEQ ID NO:. In some embodiments, an oligonucleotide comprises an antisense strand comprising at least 10, 11, 12, 13, 14, 15, 16, 17, 18, or 19 nucleotides (e.g., consecutive nucleotides) that are complementary to an ACVR1B sequence comprising any one of SEQ ID NO: 221-268. In some embodiments, an ACVR1B-targeting oligonucleotide comprises an antisense strand comprising a sequence that is at least 70%, 75%, 80%, 85%, 90%, 95%, or 97% complementary with at least 12 or at least 15 consecutive nucleotides of any one of SEQ ID NO: 221-268.

[0443] In some embodiments, an ACVR1B-targeting oligonucleotide comprises an antisense strand that comprises a region of complementarity to a target sequence as set forth in any one of SEQ ID NOs: 221-268. In some embodiments, the region of complementarity is at least 8, at least 9, at least 10, at least 11, at least 12, at least 13, at least 14, at least 15, at least 16, at least 17, or at least 19 nucleotides in length. In some embodiments, the region of complementarity is 8, 9, 10, 11, 12, 13, 14, 15, 16, 17, 18, or 19 nucleotides in length. In some embodiments, the region of complementarity is in the range of 8 to 20, 10 to 20 or 15 to 20 nucleotides in length. In some embodiments, the region of complementarity is fully complementary with all or a portion of its target sequence. In some embodiments, the region of complementarity includes 1, 2, 3 or more mismatches.

[0444] In some embodiments, an ACVR1B-targeting oligonucleotide further comprises a sense strand that hybridizes to the antisense strand to form a double stranded siRNA. In some embodiments, the ACVR1B-targeting oligonucleotide comprises an antisense strand that comprises the nucleotide sequence of any one of SEQ ID NOs: 343-366. In some embodiments, the ACVR1B-targeting oligonucleotide further comprises a sense strand that comprises the nucleotide sequence of any one of SEQ ID NOs: 245-268.

[0445] In some embodiments, the ACVR1B-targeting oligonucleotide is a double stranded oligonucleotide (e.g., an siRNA) comprising an antisense strand that comprises the nucleotide sequence of any one of SEQ ID NOs: 343-366 and a sense strand that hybridizes to the antisense strand and comprises the nucleotide sequence of any one of SEQ ID NOs: 245-268, wherein the antisense strand and/or (e.g., and) comprises one or more modified nucleosides (e.g., 2′-modified nucleosides). In some embodiment, the one or more modified nucleosides are selected from 2′-O-Me and 2′-F modified nucleosides.

[0446] In some embodiments, the ACVR1B-targeting oligonucleotide is a double stranded oligonucleotide (e.g., an siRNA) comprising an antisense strand that comprises the nucleotide sequence of any one of SEQ ID NOs: 343-366 and a sense strand that hybridizes to the antisense strand and comprises the nucleotide sequence of any one of SEQ ID NOs: 245-268, wherein each nucleoside in the antisense strand and/or (e.g., and) each nucleoside in the sense strand is a 2′-modified nucleoside selected from 2′-O-Me and 2′-F modified nucleosides.

[0447] In some embodiments, the ACVR1B-targeting oligonucleotide is a double stranded oligonucleotide (e.g., an siRNA) comprising an antisense strand that comprises the nucleotide sequence of any one of SEQ ID NOs: 343-366 and a sense strand that hybridizes to the antisense strand and comprises the nucleotide sequence of any one of SEQ ID NOs: 245-268, wherein each nucleoside in the antisense strand and each nucleoside in the sense strand is a 2′-modified nucleoside selected from 2′-O-Me and 2′-F modified nucleosides, and wherein the antisense strand and/or (e.g., and) the sense strand each comprises one or more phosphorothioate internucleoside linkages. In some embodiments, the sense strand does not comprise any phosphorothioate internucleoside linkages (all the internucleoside linkages in the sense strand are phosphodiester internucleoside linkages), and the antisense strand comprises 1, 2, or 3 phosphorothioate internucleoside linkages. In some embodiments, the antisense strand comprises 2 phosphorothioate internucleoside linkages, optionally wherein the two internucleoside linkages at the 3′ end of the antisense strand are phosphorothioate internucleoside linkages and the rest of the internucleoside linkages in the antisense strand are phosphodiester internucleoside linkages,

[0448] In some embodiments, the antisense strand of the ACVR1B-targeting oligonucleotide comprises a structure of (5′ to 3′): fNfNmNfNmNfNmNfNmNfNmNfNmNfNmNfNmNfNmNfNmN*fN*mN, wherein “mN” indicates 2′-O-methyl (2′-O-Me) modified nucleosides; “fN” indicates 2′-fluoro (2′-F) modified nucleosides; “*” indicates a phosphorothioate internucleoside linkage; and the absence of “*” between two nucleosides indicates a phosphodiester internucleoside linkage.

[0449] In some embodiments, the sense strand of the ACVR1B-targeting oligonucleotide comprises a structure of (5′ to 3′): mNmNfNmNfNmNfNmNfNmNfNmNfNmNfNmNfNmNfNmNfN, wherein “mN” indicates 2′-O-methyl (2′-O-Me) modified nucleosides; “fN” indicates 2′-fluoro (2′-F) modified nucleosides; and the absence of “*” between two nucleosides indicates a phosphodiester internucleoside linkage.

[0450] In some embodiments, the antisense strand of the ACVR1B-targeting oligonucleotide is selected from the modified version of SEQ ID NOs: 343-366 listed in Table 16. In some embodiments, the sense strand of the ACVR1B-targeting oligonucleotide is selected from the modified version of SEQ ID NOs: 245-268 listed in Table 16. In some embodiments, the ACVR1B-targeting oligonucleotide is an siRNA selected from the siRNAs listed in Table 16.

TABLE 14
ACVR1B Target Sequences

| | Cor- | | |
|---|---|---|---|
| | responding | | |
| | nucleotides | | |
| | of | ACVR1B Target | SEQ |
| Reference | Reference | Sequence | ID |
| sequence | Sequence | (5′ to 3′) | NO: |
| NM_004302.5 | 572-591 | ACAAGACGCTCCAGGATCT | 221 |
| (SEQ ID NO: 367) | | | |
| NM_004302.5 | 1034-1053 | GAATTGCTCATCGAGACTT | 222 |
| (SEQ ID NO: 367) | | | |
| NM_004302.5 | 1418-1437 | ACTGGTGGCAGAGTTATGA | 223 |
| (SEQ ID NO: 367) | | | |
| NM_004302.5 | 1294-1313 | TGCAATTCTGGAGGAGTCC | 224 |
| (SEQ ID NO: 367) | | | |
| NM_004302.5 | 565-584 | TCCAAAGACAAGACGCTCC | 225 |
| (SEQ ID NO: 367) | | | |
| NM_004302.5 | 2970-2989 | ATAATAACTTTGAAGCCAT | 226 |
| (SEQ ID NO: 367) | | | |
| NM_004302.5 | 2984-3003 | GCCATAACTTTTAACTGGA | 227 |
| (SEQ ID NO: 367) | | | |
| NM_004302.5 | 4463-4482 | CTTTTGTTTTAATATAAGA | 228 |
| (SEQ ID NO: 367) | | | |
| NM_004302.5 | 582-601 | CCAGGATCTTGTCTACGAT | 229 |
| (SEQ ID NO: 367) | | | |
| NM_004302.5 | 905-924 | ACGGGTCCCTGTTTGATTA | 230 |
| (SEQ ID NO: 367) | | | |
| NM_004302.5 | 212-231 | TTTTCAATCTGGATGGGAT | 231 |
| (SEQ ID NO: 367) | | | |
| NM_004302.5 | 4435-4454 | AATGTAAATAAATTGTAAT | 232 |
| (SEQ ID NO: 367) | | | |
| NM_004302.5 | 473-491 | TCATTGTTTTCCTTGTCAT | 233 |
| (SEQ ID NO: 367) | | | |
| NM_004302.5 | 1535-1554 | TCAGCGTGCAGGAAGACGT | 234 |
| (SEQ ID NO: 367) | | | |
| NM_004302.5 | 1784-1803 | AGAGCGAATTGTGTGGAGA | 235 |
| (SEQ ID NO: 367) | | | |
| NM_199230.1 | 1401-1420 | ATGAGGCCTTGCGAGTGAT | 236 |
| (SEQ ID NO: 370) | | | |
| NM_199230.1 | 964-983 | CCTGCATATGGAGATTGTG | 237 |
| (SEQ ID NO: 370) | | | |
| NM_199230.1 | 2046-2065 | TGCGCATGTGCCGAGGTGT | 238 |
| (SEQ ID NO: 370) | | | |
| NM_199230.1 | 1104-1123 | CTGACACCATAGACATTGC | 239 |
| (SEQ ID NO: 370) | | | |
| NM_199230.1 | 293-312 | CACTGCTGCTATATTGACT | 240 |
| (SEQ ID NO: 370) | | | |
| NM_199230.1 | 174-193 | TCTCCATCTTTAACCTGGA | 241 |
| (SEQ ID NO: 370) | | | |
| NM_199230.1 | 1654-1673 | GACAGAGCCTGGGAGACGC | 242 |
| (SEQ ID NO: 370) | | | |
| NM_199230.1 | 970-989 | TATGGAGATTGTGGGCACT | 243 |
| (SEQ ID NO: 370) | | | |
| NM_199230.1 | 642-661 | AAGAGATTATCGGCAAGGG | 244 |
| (SEQ ID NO: 370) | | | |

* The target sequences contain Ts, but binding to RNA and/or DNA is contemplated.

[0451] In some embodiments, an oligonucleotide may comprise or consist of any sequence as provided in Table 15.

TABLE 15
Oligonucleotide sequences for targeting ACVR1IB

| Passenger Strand/ | | Guide Strand/ | |
|---|---|---|---|
| Sense Strand | SEQ | Antisense Strand | SEQ |
| (RNA) | ID | (RNA) | ID |
| (5’ to 3’) | NO: | (5’ to 3’) | NO: |
| AGACAAGACGCUCCAGGAUCU | 245 | AGAUCCUGGAGCGUCUUGUCUUU | 343 |
| UGGAAUUGCUCAUCGAGACUU | 246 | AAGUCUCGAUGAGCAAUUCCAGG | 344 |
| CAACUGGUGGCAGAGUUAUGA | 247 | UCAUAACUCUGCCACCAGUUGGG | 345 |
| GAUGCAAUUCUGGAGGAGUCC | 248 | GGACUCCUCCAGAAUUGCAUCUU | 346 |
| UCUCCAAAGACAAGACGCUCC | 249 | GGAGCGUCUUGUCUUUGGAGAGA | 347 |
| AUAUAAUAACUUUGAAGCCAU | 250 | AUGGCUUCAAAGUUAUUAUAUAC | 348 |
| AAGCCAUAACUUUUAACUGGA | 251 | UCCAGUUAAAAGUUAUGGCUUCA | 349 |
| AUCUUUUGUUUUAAUAUAAGA | 252 | UCUUAUAUUAAAACAAAAGAUUU | 350 |
| CUCCAGGAUCUUGUCUACGAU | 253 | AUCGUAGACAAGAUCCUGGAGCG | 351 |
| GCACGGGUCCCUGUUUGAUUA | 254 | UAAUCAAACAGGGACCCGUGCUC | 352 |
| CAUUUUCAAUCUGGAUGGGAU | 255 | AUCCCAUCCAGAUUGAAAAUGGA | 353 |
| CAAAUGUAAAUAAAUUGUAAU | 256 | AUUACAAUUUAUUUACAUUUGCA | 354 |
| CAUCAUUGUUUUCCUUGUCAU | 257 | AUGACAAGGAAAACAAUGAUGAU | 355 |
| GCUCAGCGUGCAGGAAGACGU | 258 | ACGUCUUCCUGCACGCUGAGCUG | 356 |
| UGAGAGCGAAUUGUGUGGAGA | 259 | UCUCCACACAAUUCGCUCUCAGA | 357 |
| UUAUGAGGCCUUGCGAGUGAU | 260 | AUCACUCGCAAGGCCUCAUAACU | 358 |
| CACCUGCAUAUGGAGAUUGUG | 261 | CACAAUCUCCAUAUGCAGGUGUG | 359 |
| AGUGCGCAUGUGCCGAGGUGU | 262 | ACACCUCGGCACAUGCGCACUUG | 360 |
| CACUGACACCAUAGACAUUGC | 263 | GCAAUGUCUAUGGUGUCAGUGAC | 361 |
| CACACUGCUGCUAUAUUGACU | 264 | AGUCAAUAUAGCAGCAGUGUGUG | 362 |
| GGUCUCCAUCUUUAACCUGGA | 265 | UCCAGGUUAAAGAUGGAGACCAU | 363 |
| GGGACAGAGCCUGGGAGACGC | 266 | GCGUCUCCCAGGCUCUGUCCCUC | 364 |
| CAUAUGGAGAUUGUGGGCACU | 267 | AGUGCCCACAAUCUCCAUAUGCA | 365 |
| ACAAGAGAUUAUCGGCAAGGG | 268 | CCCUUGCCGAUAAUCUCUUGUAA | 366 |

[0452] In some embodiments, an oligonucleotide is a modified oligonucleotide as provided in Table 16, wherein ‘mN’ represents a 2′-O-methyl modified nucleoside (e.g., mU is 2′-O-methyl modified uridine), ‘fN’ represents a 2′-fluoro modified nucleoside (e.g., fU is 2′-fluoro modified uridine), ‘*’ represents a phosphorothioate internucleoside linkage, and lack of “*” between nucleosides indicate phosphodiester internucleoside linkage.

TABLE 16
Modified Oligonucleotides for targetting ACVR1B

| | Modified Passenger | | Modified Guide | |
|---|---|---|---|---|
| | Strand/Sense Strand | SEQ | Strand/Antisense | SEQ |
| siRNA # | (RNA) (5′ to 3′) | ID NO: | Strand (RNA)(5′ to 3′) | ID NO: |
| hsACVR1B-3 | mAmGfAmCfAmAfGmAfCm | 245 | fAfGmAfUmCfCmUfGmGfAmGf | 343 |
| | GfCmUfCmCfAmGfGmAfU | | CmGfUmCfUmUfGmUfCmU*fU* | |
| | mCfU | | mU | |
| hsACVR1B-4 | mUmGfGmAfAmUfUmGfCm | 246 | fAfAmGfUmCfUmCfGmAfUmGf | 344 |
| | UfCmAfUmCfGmAfGmAfC | | AmGfCmAfAmUfUmCfCmA*fG* | |
| | mUfU | | mG | |
| hsACVR1B-5 | mCmAfAmCfUmGfGmUfGm | 247 | fUfCmAfUmAfAmCfUmCfUmGf | 345 |
| | GfCmAfGmAfGmUfUmAfU | | CmCfAmCfCmAfGmUfUmG*fG* | |
| | mGfA | | mG | |
| hsACVR1B-6 | mGmAfUmGfCmAfAmUfUm | 248 | fGfGmAfCmUfCmCfUmCfCmAf | 346 |
| | CfUmGfGmAfGmGfAmGfU | | GmAfAmUfUmGfCmAfUmC*fU* | |
| | mCfC | | mU | |
| hsACVR1B-7 | mUmCfUmCfCmAfAmAfGm | 249 | fGfGmAfGmCfGmUfCmUfUmGf | 347 |
| | AfCmAfAmGfAmCfGmCfU | | UmCfUmUfUmGfGmAfGmA*fG* | |
| | mCfC | | mA | |
| hsACVR1B-8 | mAmUfAmUfAmAfUmAfAm | 250 | fAfUmGfGmCfUmUfCmAfAmAf | 348 |
| | CfUmUfUmGfAmAfGmCfC | | GmUfUmAfUmUfAmUfAmU*fA* | |
| | mAfU | | mC | |
| hsACVR1B-9 | mAmAfGmCfCmAfUmAfAm | 251 | fUfCmCfAmGfUmUfAmAfAmAf | 349 |
| | CfUmUfUmUfAmAfCmUfG | | GmUfUmAfUmGfGmCfUmU*fC* | |
| | mGfA | | mA | |
| hsACVR1B-10 | mAmUfCmUfUmUfUmGfUm | 252 | fUfCmUfUmAfUmAfUmUfAmAf | 350 |
| | UfUmUfAmAfUmAfUmAfA | | AmAfCmAfAmAfAmGfAmU*fU* | |
| | mGfA | | mU | |
| hsACVRIB-1 | mCmUfCmCfAmGfGmAfUm | 253 | fAfUmCfGmUfAmGfAmCfAmAf | 351 |
| | CfUmUfGmUfCmUfAmCfG | | GmAfUmCfCmUfGmGfAmG*fC* | |
| | mAfU | | mG | |
| hsACVRIB-11 | mGmCfAmCfGmGfGmUfCm | 254 | fUfAmAfUmCfAmAfAmCfAmGf | 352 |
| | CfCmUfGmUfUmUfGmAfU | | GmGfAmCfCmCfGmUfGmC*fU* | |
| | mUfA | | mC | |
| hsACVR1B-12 | mCmAfUmUfUmUfCmAfAm | 255 | fAfUmCfCmCfAmUfCmCfAmGf | 353 |
| | UfCmUfGmGfAmUfGmGfG | | AmUfUmGfAmAfAmAfUmG*fG* | |
| | mAfU | | mA | |
| hsACVR1B-13 | mCmAfAmAfUmGfUmAfAm | 256 | fAfUmUfAmCfAmAfUmUfUmAf | 354 |
| | AfUmAfAmAfUmUfGmUfA | | UmUfUmAfCmAfUmUfUmG*fC* | |
| | mAfU | | mA | |
| hsACVR1B-2 | mCmAfUmCfAmUfUmGfUm | 257 | fAfUmGfAmCfAmAfGmGfAmAf | 355 |
| | UfUmUfCmCfUmUfGmUfC | | AmAfCmAfAmUfGmAfUmG*fA* | |
| | mAfU | | mU | |
| hsACVR1B-14 | mGmCfUmCfAmGfCmGfUm | 258 | fAfCmGfUmCfUmUfCmCfUmGf | 356 |
| | GfCmAfGmGfAmAfGmAfC | | CmAfCmGfCmUfGmAfGmC*fU* | |
| | mGfU | | mG | |
| hsACVR1B-15 | mUmGfAmGfAmGfCmGfAm | 259 | fUfCmUfCmCfAmCfAmCfAmAf | 357 |
| | AfUmUfGmUfGmUfGmGfA | | UmUfCmGfCmUfCmUfCmA*fG* | |
| | mGfA | | mA | |
| mmACVR1B-4 | mUmUfAmUfGmAfGmGfCm | 260 | fAfUmCfAmCfUmCfGmCfAmAf | 358 |
| | CfUmUfGmCfGmAfGmUfG | | GmGfCmCfUmCfAmUfAmA*fC* | |
| | mAfU | | mU | |
| mmACVR1B-5 | mCmAfCmCfUmGfCmAfUm | 261 | fCfAmCfAmAfUmCfUmCfCmAf | 359 |
| | AfUmGfGmAfGmAfUmUfG | | UmAfUmGfCmAfGmGfUmG*fU* | |
| | mUfG | | mG | |
| mmACVR1B-6 | mAmGfUmGfCmGfCmAfUm | 262 | fAfCmAfCmCfUmCfGmGfCmAf | 360 |
| | GfUmGfCmCfGmAfGmGfU | | CmAfUmGfCmGfCmAfCmU*fU* | |
| | mGfU | | mG | |
| mmACVR1B-7 | mCmAfCmUfGmAfCmAfCm | 263 | fGfCmAfAmUfGmUfCmUfAmUf | 361 |
| | CfAmUfAmGfAmCfAmUfU | | GmGfUmGfUmCfAmGfUmG*fA* | |
| | mGfC | | mC | |
| mmACVR1B-1 | mCmAfCmAfCmUfGmCfUm | 264 | fAfGmUfCmAfAmUfAmUfAmGf | 362 |
| | GfCmUfAmUfAmUfUmGfA | | CmAfGmCfAmGfUmGfUmG*fU* | |
| | mCfU | | mG | |
| mmACVR1B-2 | mGmGfUmCfUmCfCmAfUm | 265 | fUfCmCfAmGfGmUfUmAfAmAf | 363 |
| | CfUmUfUmAfAmCfCmUfG | | GmAfUmGfGmAfGmAfCmC*fA* | |
| | mGfA | | mU | |
| mmACVR1B-8 | mGmGfGmAfCmAfGmAfGm | 266 | fGfCmGfUmCfUmCfCmCfAmGf | 364 |
| | CfCmUfGmGfGmAfGmAfC | | GmCfUmCfUmGfUmCfCmC*fU* | |
| | mGfC | | mC | |
| mmACVR1B-9 | mCmAfUmAfUmGfGmAfGm | 267 | fAfGmUfGmCfCmCfAmCfAmAf | 365 |
| | AfUmUfGmUfGmGfGmCfA | | UmCfUmCfCmAfUmAfUmG*fC* | |
| | mCfU | | mA | |
| mmACVR1B-3 | mAmCfAmAfGmAfGmAfUm | 268 | fCfCmCfUmUfGmCfCmGfAmUf | 366 |
| | UfAmUfCmGfGmCfAmAfG | | AmAfUmCfUmCfUmUfGmU*fA* | |
| | mGfG | | mA | |

[0453] d. MLCK1 Oligonucleotides

[0454] In some embodiments, the oligonucleotide is an antisense oligonucleotide (ASO). In some embodiments, the oligonucleotide is a siRNA. In some embodiments, the oligonucleotide is a short hairpin RNA. In some embodiments, the oligonucleotide is a miRNA-based shRNA (e.g., based on miR-155 or miR-200c). In some embodiments, the oligonucleotide is a CRISPR guide RNA targeting MLCK1. In some embodiments, the oligonucleotide inhibits the expression or function of MLCK1.

[0455] Examples of oligonucleotides useful for targeting MLCK1 are provided in Weber M. et al. “MiRNA-155 targets myosin light chain kinase and modulates actin cytoskeleton organization in endothelial cells.” Am J Physiol Heart Circ Physiol. 2014 Apr. 15; 306(8):H1192-203.; Thatcher S. E. et al. “Myosin light chain kinase/actin interaction in phorbol dibutyrate-stimulated smooth muscle cells.” J Pharmacol Sci. 2011; 116(1):116-27.; Kohama K. and Nakamura A. “Targeting of myosin light chain kinase in vascular smooth muscle cells, and its implication for drug discovery.” Nihon Yakurigaku Zasshi. 2001 October; 118(4):269-76.; and U.S. Patent Application Publication 2010/0093830, entitled Modulation of MLCK-L expression and uses thereof,” published on Apr. 15, 2010; the contents of each of which are incorporated herein in their entireties.

[0456] In some embodiments, oligonucleotides may have a region of complementarity to a human MLCK1 sequence, for example, as provided below (Gene ID: 4638; NCBI Ref. No: NM_053025.4):

(SEQ ID NO: 411)
GGGCTCCCCGCGCCGCCCGGTCGGCAGCAGGGCGCTGAGCGAGCTCGGAGCCCGCGCTGTGCGC
CTGCGGCCGGGGCGCCCCGCCGAGCGCCGGTGCCCCGGCTCCCGGGCCGCCTTCGCCGCGCGGG
AAGGATTCTTCAAAATTAACAGAAACCAATTCGGGCCAGCTGAAGAGAAAAAATAAAGGTGGCT
CCCGGCTGCCTCTGCTGCAGTTCAGAGCAACTTCAGGAGCTTCCCAGCCGAGAGCTTCAGGACG
CCTTTCCTGTCCCACTGGCCCAGTTGCCACAACAAACAACAGAGAAGACGGTGACCATGGGGGA
TGTGAAGCTGGTTGCCTCGTCACACATTTCCAAAACCTCCCTCAGTGTGGATCCCTCAAGAGTT
GACTCCATGCCCCTGACAGAGGCCCCTGCTTTCATTTTGCCCCCTCGGAACCTCTGCATCAAAG
AAGGAGCCACCGCCAAGTTCGAAGGGCGGGTCCGGGGTTACCCAGAGCCCCAGGTGACATGGCA
CAGAAACGGGCAACCCATCACCAGCGGGGGCCGCTTCCTGCTGGATTGCGGCATCCGGGGGACT
TTCAGCCTTGTGATTCATGCTGTCCATGAGGAGGACAGGGGAAAGTATACCTGTGAAGCCACCA
ATGGCAGTGGTGCTCGCCAGGTGACAGTGGAGTTGACAGTAGAAGGAAGTTTTGCGAAGCAGCT
TGGTCAGCCTGTTGTTTCCAAAACCTTAGGGGATAGATTTTCAGCTCCAGCAGTGGAGACCCGT
CCTAGCATCTGGGGGGAGTGCCCACCAAAGTTTGCTACCAAGCTGGGCCGAGTTGTGGTCAAAG
AAGGACAGATGGGACGATTCTCCTGCAAGATCACTGGCCGGCCCCAACCGCAGGTCACCTGGCT
CAAGGGAAATGTTCCACTGCAGCCGAGTGCCCGTGTGTCTGTGTCTGAGAAGAACGGCATGCAG
GTTCTGGAAATCCATGGAGTCAACCAAGATGACGTGGGAGTGTACACGTGCCTGGTGGTGAACG
GGTCGGGGAAGGCCTCGATGTCAGCTGAACTTTCCATCCAAGGTTTGGACAGTGCCAATAGGTC
ATTTGTGAGAGAAACAAAAGCCACCAATTCAGATGTCAGGAAAGAGGTGACCAATGTAATCTCA
AAGGAGTCGAAGCTGGACAGTCTGGAGGCTGCAGCCAAAAGCAAGAACTGCTCCAGCCCCCAGA
GAGGTGGCTCCCCACCCTGGGCTGCAAACAGCCAGCCTCAGCCCCCAAGGGAGTCCAAGCTGGA
GTCATGCAAGGACTCGCCCAGAACGGCCCCGCAGACCCCGGTCCTTCAGAAGACTTCCAGCTCC
ATCACCCTGCAGGCCGCAAGAGTTCAGCCGGAACCAAGAGCACCAGGCCTGGGGGTCCTATCAC
CTTCTGGAGAAGAGAGGAAGAGGCCAGCTCCTCCCCGTCCAGCCACCTTCCCCACCAGGCAGCC
TGGCCTGGGGAGCCAAGATGTTGTGAGCAAGGCTGCTAACAGGAGAATCCCCATGGAGGGCCAG
AGGGATTCAGCATTCCCCAAATTTGAGAGCAAGCCCCAAAGCCAGGAGGTCAAGGAAAATCAAA
CTGTCAAGTTCAGATGTGAAGTTTCCGGGATTCCAAAGCCTGAAGTGGCCTGGTTCCTGGAAGG
CACCCCCGTGAGGAGACAGGAAGGCAGCATTGAGGTTTATGAAGATGCTGGCTCCCATTACCTC
TGCCTGCTGAAAGCCCGGACCAGGGACAGTGGGACATACAGCTGCACTGCTTCCAACGCCCAAG
GCCAGCTGTCCTGTAGCTGGACCCTCCAAGTGGAAAGGCTTGCCGTGATGGAGGTGGCCCCCTC
CTTCTCCAGTGTCCTGAAGGACTGCGCTGTTATTGAGGGCCAGGATTTTGTGCTGCAGTGCTCC
GTACGGGGGACCCCAGTGCCCCGGATCACTTGGCTGCTGAATGGGCAGCCCATCCAGTACGCTC
GCTCCACCTGCGAGGCCGGCGTGGCTGAGCTCCACATCCAGGATGCCCTGCCGGAGGACCATGG
CACCTACACCTGCCTAGCTGAGAATGCCTTGGGGCAGGTGTCCTGCAGCGCCTGGGTCACCGTC
CATGAAAAGAAGAGTAGCAGGAAGAGTGAGTACCTTCTGCCTGTGGCTCCCAGCAAGCCCACTG
CACCCATCTTCCTGCAGGGCCTCTCTGATCTCAAAGTCATGGATGGAAGCCAGGTCACTATGAC
TGTCCAAGTGTCAGGGAATCCACCCCCTGAAGTCATCTGGCTGCACAATGGGAATGAGATCCAA
GAGTCAGAGGACTTCCACTTTGAACAGAGAGGAACTCAGCACAGCCTTTGTATCCAGGAAGTGT
TCCCGGAGGACACGGGCACGTACACCTGCGAGGCCTGGAACAGCGCTGGAGAGGTCCGCACCCA
GGCCGTGCTCACGGTACAAGAGCCTCACGATGGCACCCAGCCCTGGTTCATCAGTAAGCCTCGC
TCAGTGACAGCCTCCCTGGGCCAGAGTGTCCTCATCTCCTGCGCCATAGCTGGTGACCCCTTTC
CTACCGTGCACTGGCTCAGAGATGGCAAAGCCCTCTGCAAAGACACTGGCCACTTCGAGGTGCT
TCAGAATGAGGACGTGTTCACCCTGGTTCTAAAGAAGGTGCAGCCCTGGCATGCCGGCCAGTAT
GAGATCCTGCTCAAGAACCGGGTTGGCGAATGCAGTTGCCAGGTGTCACTGATGCTACAGAACA
GCTCTGCCAGAGCCCTTCCACGGGGGAGGGAGCCTGCCAGCTGCGAGGACCTCTGTGGTGGAGG
AGTTGGTGCTGATGGTGGTGGTAGTGACCGCTATGGGTCCCTGAGGCCTGGCTGGCCAGCAAGA
GGGCAGGGTTGGCTAGAGGAGGAAGACGGCGAGGACGTGCGAGGGGTGCTGAAGAGGCGCGTGG
AGACGAGGCAGCACACTGAGGAGGCGATCCGCCAGCAGGAGGTGGAGCAGCTGGACTTCCGAGA
CCTCCTGGGGAAGAAGGTGAGTACAAAGACCCTATCGGAAGACGACCTGAAGGAGATCCCAGCC
GAGCAGATGGATTTCCGTGCCAACCTGCAGCGGCAAGTGAAGCCAAAGACTGTGTCTGAGGAAG
AGAGGAAGGTGCACAGCCCCCAGCAGGTCGATTTTCGCTCTGTCCTGGCCAAGAAGGGGACTTC
CAAGACCCCCGTGCCTGAGAAGGTGCCACCGCCAAAACCTGCCACCCCGGATTTTCGCTCAGTG
CTGGGTGGCAAGAAGAAATTACCAGCAGAGAATGGCAGCAGCAGTGCCGAGACCCTGAATGCCA
AGGCAGTGGAGAGTTCCAAGCCCCTGAGCAATGCACAGCCTTCAGGGCCCTTGAAACCCGTGGG
CAACGCCAAGCCTGCTGAGACCCTGAAGCCAATGGGCAACGCCAAGCCTGCCGAGACCCTGAAG
CCCATGGGCAATGCCAAGCCTGATGAGAACCTGAAATCCGCTAGCAAAGAAGAACTCAAGAAAG
ACGTTAAGAATGATGTGAACTGCAAGAGAGGCCATGCAGGGACCACAGATAATGAAAAGAGATC
AGAGAGCCAGGGGACAGCCCCAGCCTTCAAGCAGAAGCTGCAAGATGTTCATGTGGCAGAGGGC
AAGAAGCTGCTGCTCCAGTGCCAGGTGTCTTCTGACCCCCCAGCCACCATCATCTGGACGCTGA
ACGGAAAGACCCTCAAGACCACCAAGTTCATCATCCTCTCCCAGGAAGGCTCACTCTGCTCCGT
CTCCATCGAGAAGGCACTGCCTGAGGACAGAGGCTTATACAAGTGTGTAGCCAAGAATGACGCT
GGCCAGGCGGAGTGCTCCTGCCAAGTCACCGTGGATGATGCTCCAGCCAGTGAGAACACCAAGG
CCCCAGAGATGAAATCCCGGAGGCCCAAGAGCTCTCTTCCTCCCGTGCTAGGAACTGAGAGTGA
TGCGACTGTGAAAAAGAAACCTGCCCCCAAGACACCTCCGAAGGCAGCAATGCCCCCTCAGATC
ATCCAGTTCCCTGAGGACCAGAAGGTACGCGCAGGAGAGTCAGTGGAGCTGTTTGGCAAAGTGA
CAGGCACTCAGCCCATCACCTGTACCTGGATGAAGTTCCGAAAGCAGATCCAGGAAAGCGAGCA
CATGAAGGTGGAGAACAGCGAGAATGGCAGCAAGCTCACCATCCTGGCCGCGCGCCAGGAGCAC
TGCGGCTGCTACACACTGCTGGTGGAGAACAAGCTGGGCAGCAGGCAGGCCCAGGTCAACCTCA
CTGTCGTGGATAAGCCAGACCCCCCAGCTGGCACACCTTGTGCCTCTGACATTCGGAGCTCCTC
ACTGACCCTGTCCTGGTATGGCTCCTCATATGATGGGGGCAGTGCTGTACAGTCCTACAGCATC
GAGATCTGGGACTCAGCCAACAAGACGTGGAAGGAACTAGCCACATGCCGCAGCACCTCTTTCA
ACGTCCAGGACCTGCTGCCTGACCACGAATATAAGTTCCGTGTACGTGCAATCAACGTGTATGG
AACCAGTGAGCCAAGCCAGGAGTCTGAACTCACAACGGTAGGAGAGAAACCTGAAGAGCCGAAG
GATGAAGTGGAGGTGTCAGATGATGATGAGAAGGAGCCCGAGGTTGATTACCGGACAGTGACAA
TCAATACTGAACAAAAAGTATCTGACTTCTACGACATTGAGGAGAGATTAGGATCTGGGAAATT
TGGACAGGTCTTTCGACTTGTAGAAAAGAAAACTCGAAAAGTCTGGGCAGGGAAGTTCTTCAAG
GCATATTCAGCAAAAGAGAAAGAGAATATCCGGCAGGAGATTAGCATCATGAACTGCCTCCACC
ACCCTAAGCTGGTCCAGTGTGTGGATGCCTTTGAAGAAAAGGCCAACATCGTCATGGTCCTGGA
GATCGTGTCAGGAGGGGAGCTGTTTGAGCGCATCATTGACGAGGACTTTGAGCTGACGGAGCGT
GAGTGCATCAAGTACATGCGGCAGATCTCGGAGGGAGTGGAGTACATCCACAAGCAGGGCATCG
TGCACCTGGACCTCAAGCCGGAGAACATCATGTGTGTCAACAAGACGGGCACCAGGATCAAGCT
CATCGACTTTGGTCTGGCCAGGAGGCTGGAGAATGCGGGGTCTCTGAAGGTCCTCTTTGGCACC
CCAGAATTTGTGGCTCCTGAAGTGATCAACTATGAGCCCATCGGCTACGCCACAGACATGTGGA
GCATCGGGGTCATCTGCTACATCCTAGTCAGTGGCCTTTCCCCCTTCATGGGAGACAACGATAA
CGAAACCTTGGCCAACGTTACCTCAGCCACCTGGGACTTCGACGACGAGGCATTCGATGAGATC
TCCGACGATGCCAAGGATTTCATCAGCAATCTGCTGAAGAAAGATATGAAAAACCGCCTGGACT
GCACGCAGTGCCTTCAGCATCCATGGCTAATGAAAGATACCAAGAACATGGAGGCCAAGAAACT
CTCCAAGGACCGGATGAAGAAGTACATGGCAAGAAGGAAATGGCAGAAAACGGGCAATGCTGTG
AGAGCCATTGGAAGACTGTCCTCTATGGCAATGATCTCAGGGCTCAGTGGCAGGAAATCCTCAA
CAGGGTCACCAACCAGCCCGCTCAATGCAGAAAAACTAGAATCTGAAGAAGATGTGTCCCAAGC
TTTCCTTGAGGCTGTTGCTGAGGAAAAGCCTCATGTAAAACCCTATTTCTCTAAGACCATTCGC
GATTTAGAAGTTGTGGAGGGAAGTGCTGCTAGATTTGACTGCAAGATTGAAGGATACCCAGACC
CCGAGGTTGTCTGGTTCAAAGATGACCAGTCAATCAGGGAGTCCCGCCACTTCCAGATAGACTA
CGATGAGGACGGGAACTGCTCTTTAATTATTAGTGATGTTTGCGGGGATGACGATGCCAAGTAC
ACCTGCAAGGCTGTCAACAGTCTTGGAGAAGCCACCTGCACAGCAGAGCTCATTGTGGAAACGA
TGGAGGAAGGTGAAGGGGAAGGGGAAGAGGAAGAAGAGTGAAACAAAGCCAGAGAAAAGCAGTT
TCTAAGTCATATTAAAAGGACTATTTCTCTAAAACTCAAAAAAAAAAAAAAAACTCAAGATAGT
AAAAGCACCTAGTGTGATAGATTATCGGTTAGGTCATTTGTGGGTTGATTCTTCAGAAACAGCA
GTTGATACCTAGCAGCGTTATTGATGGGCATTAATCTATGTTAGTTGGCACCTTAAGATACTAG
TGCAGCTAGATTTCATTTAGGGAAATCACCAGTAACTTGACTGACCAATTGATTTTAGAGAGAA
AGTAACCAAACCAAATATTTATCTGGGCAAAGTCATAAATTCTCCACTTGAATGCGCTCATGAA
AAATAAGGCCAAAACAAGAGTTCTGGGCCACAGCTCAGCCCAGAGGGTTCCTGGGGATGGGAGG
CCTCTCTCTCCCCACCCCCTGACTCTAGAGAACTGGGTTTTCTCCCAGTACTCCAGCAATTCAT
TTCTGAAAGCAGTTGAGCCACTTTATTCCAAAGTACACTGCAGATGTTCAAACTCTCCATTTCT
CTTTCCCCTTCCACCTGCCAGTTTTGCTGACTCTCAACTTGTCATGAGTGTAAGCATTAAGGAC
ATTATGCTTCTTCGATTCTGAAGACAGGTCCCTGCTCATGGATGACTCTGGCTTCCTTAGGAAA
ATATTTTTCTTCCAAAATCAGTAGGAAATCTAAACTTATCCCCTCTTTGCAGATGTCTAGCAGC
TTCAGACATTTGGTTAAGAACCCATGGGAAAAAAAAAATCCTTGCTAATGTGGTTTCCTTTGTA
AACCAGGATTCTTATTTGTGCTGTTATAGAATATCAGCTCTGAACGTGTGGTAAAGATTTTTGT
GTTTGAATATAGGAGAAATCAGTTTGCTGAAAAGTTAGTCTTAATTATCTATTGGCCACGATGA
AACAGATTTCAACTGATAAAGAGCTGGAGAACTCCATGTACTTTGGAATCTCCTCCAAGATAGC
CAGAGTTTAATACATCTTCATTCTCAACACTCTCCAAAGAACTTGACCTACCTTATGGGTTCCA
TATTTTTCTTCTTAAATGTGCATCAATCATGCCTTGCCCCCAACCTTTAAATATATTCTTAGAC
CTGGTAAATGCACTCAGACTTGCGTCTTTAGGAATTTTTAACTTTCTTTCACTACATTGGCACT
TAAATTTTTTCTTTATAAAGCTTTTTGAAGGTCATAAACAAAGACCATAATTGATGATAGACCT
AATACATTTCCTCTGTGTGTGTGTGTAACATTCCAAATACTTTTTTTTTCTTTTCCACTGTTTG
TAAGGTGCAACAATTTAATATTTTTAAGGGACTTTTTAAGAGTTCCTTAAGAACCAATTTAAAA
TTACTTCAGTGCAATCCTACACAGTATCAACATTAGAATTTTGATATTAGTCTTATGTTATCTT
CCATTCTATTTTTATCTGCTTTTTGCTGCTAGTTTCAAACTGCCAGTATTTTTCCTTTTGCTTT
TAAAATAGTTACAATATTTTTCATGATAGCCACAGTATTGCCACAGTTTATTATAATAAAGGGT
TTTTATTTGATTTAGCGCATTCAAAGCTTTTTTCTATCACTTTTGTGTTCAGAATATAACCTTT
GTGTGCGTGTATGTTGTGTGTGTGCATGTGTGGCGTATATGTGTGTTACAGGTTAATGCCTTCT
TGGAATTGTGTTAATGTTCTCTTGGTTTATTATGCCATCAGAATGGTAAATGAGAACACTACAA
CTGTAGTCAGCTCACAATTTTTAAATAAAGGATACCACAGTGCATGCTGTTTGTTCAATCTTTG
CAGACTTCTCTTTCTTTCCATGCTACCAGTTGTAAAGGACACAGCTATATCCTGGAAATGAAAA
ACAAACACTGTGGTGCCTAGATGTGAAGAACTGGCTTATGTGGTTGTGTTTTGCTATGGAACAG
AATGATTTAGGAAGTTCTTGTTTATATAGGTAGCCGAATTTACACATTTAGTTCAAAATTTCTC
TTGAGCATCAGCTTAGTACTATATCAATCATTCTAGAAGGATATCTTATAGAGCAGGTGTCCCC
AACCCCCGGTAAGTAGCCTGTTAGGAACCAGGTCACACATAAGGAGGTTAGCAGTGGGCAAGTG
AGCAAAGCATCATCTATATTTACAGCCGATCCCCATTGCTCGCATTACCGCCTGAGCTCTGCCT
CCTGTCAGATCAGCGGCAGCATCAGGTTCTCTCAGGAACGAACTCTATTGTGAACTGCTCATGT
GAGGGATCTAGGTTTCACGCTCCTTATGAGAATCTAACACCTGATGATCTGTCACTGTCTCCCA
TCACCCCTAGATGGGACAGTCTAGTTGCAGGAAAACAAGCTCAGGGCTTCCACTGATTCTACAT
TATGATGAGTTGTATACTTATTTTATATTATAATAAAATATATTATTACAATGTAATAATAATA
GAAATAAAATGCACAATACATGTAATGTGCTTGAATAATCCCAAAACCACCCCCTCTCCTGGTC
CATGGAAAAACTGTCTTCCATGAAAGTGGTCCCTGGTGCCAAAAAGGTTAGGGACCACTGTTAC
AGAGTATCAGGTCCTCAAGATGCTAAAATCTATATGACATTTTTAACATGTGACATTATCATCA
TCATCATCATCATCATCACTGATGATACTATTTACCAGGGCATGGTTTGAATTGGTGACTTTGG
TGCAGTTCATTATTGGCAGCCAAATGCTTTATCCATACCTTCATATTGAAGAATTTGTTATCAG
GAAACTACCAGTCCTGCTTTACAGGAAGTCTGTTATCAGATATCAGATGGCAAGTTCCCCATGT
CTTCAGATGTTCAAACAATATTGTGGATGGTCTAGAAAGAGTTTAAGACATGCTGTTAAATGTA
GGGCTAGATAATTCTCTGATTCTTTGATGTAGTCTGGAAAGAAACAATCCATTGTCCAGTTAAT
AAATATTTAGTGTTTTCATTTTTAAGACACTCACAATCCACAAATGTCCCTAACAATTTATTAT
TTTTAAAGAAAATGACTTTTTATTCCTTGCTAGTGAAAAATGTACAATTTATATGCTGCACTGA
GAAAAATAACAGATATACTTTCTTCCATTCATTTTCATCCCAAACATATAAAAAATAATCCATT
GATTGTTCCTTGCATTGCATATCTTATTAAAAGATATTTCCTACATGCAACTAATAAGACATGC
TGACTGTTGTCAGCTCTAAATTTATGTAAAGATTTTTTATTTTTGTTAAAATGTTTGAAATTTG
CTTTTTGCTCCACACCTCACCTGTTTTTGATAAATCTGTGCTAATAAGTACATAGGAGGTAATA
AATAATTGAGTTGTGAGAAACCCAATTCTCCATTTTTCAAGAAAACACAAGTAGCACTACTCTC
TTTATCCCTTGGGACTCCTTCCTGTAATTTGAAAGGGGGGGCTAATGTTGGTGGCAGTTGTTGC
TAAGGATCTCTGCACAGAGTTAGGGCTTCACTCTCGGCTTCCTGGTTAGATGGGGCCATGTGAC
TAGTCCTAGTCAGTGAGCTGTGACCAGAAGTGATGTATGTACCCTCGGGACCAGAGCATTTATG
TGCTGGTACAAGCCTCTCCATAATGACGGGCAACACATGAGATGGTGGCTGCTGCAGCCATCTG
GGTCTCTAGCCAACCCAAAATGGGGACATAACACAAGCAAGAAATAAACATTTGTTCTTATAAA
TCACCAAGATTTTGGGGTTCTCAGTGGCTGCAACATAACCTAGACTATCCTGATACAGGCTTAT
CACCATGTTCTGGATGTGTGGTGACCAGGATGGTAGCCACTACTCACAAGTGGCTATTTAAATT
TAAGTTACTTTAAAAAATAAAATAAAAAATTCAGTTCCTCAGTTGTATGAGTTACATTTCAAAT
GCTCGACAGTCACATGTACATCACTTTTCAAATTATGTGAAATTAAAACTGAAAAGCTTGTGTG
AAAGTCTAGAGAGTATGGTCTATAGTTTCATCAATTGTATTGGATAATATAGTCTCGATACTCA
A

[0457] In some embodiments, the oligonucleotide may have region of complementarity to a mutant form of MLCK1, for example as reported in Halim D. et al. “Loss-of-Function Variants in MYLK Cause Recessive Megacystis Microcolon Intestinal Hypoperistalsis Syndrome.” Am J Hum Genet. 2017 Jul. 6; 101(1):123-129; Hannuksela M. et al. “A novel variant in MYLK causes thoracic aortic dissections: genotypic and phenotypic description.” BMC Med Genet. 2016 Sep. 1; 17(1):61; or Shalata, A. et al. “Fatal thoracic aortic aneurysm and dissection in a large family with a novel MYLK gene mutation: delineation of the clinical phenotype.” Orphanet J Rare Dis. 2018 Mar. 15; 13(1):41; the contents of each of which are incorporated herein by reference in their entireties.

[0458] In some embodiments, the oligonucleotide comprises a region of complementarity to an MCLK1 mRNA sequence as set forth in SEQ ID NO: 411. In some embodiments, the region of complementarity is at least 8, at least 9, at least 10, at least 11, at least 12, at least 13, at least 14, at least 15, at least 16, at least 17, at least 19 or at least 20 nucleotides in length. In some embodiments, the region of complementarity is 8, 9, 10, 11, 12, 13, 14, 15, 16, 17, 18, 19, or 20 nucleotides in length. In some embodiments, the region of complementarity is in the range of 8 to 20, 10 to 20 or 15 to 20 nucleotides in length. In some embodiments, the region of complementarity is fully complementarity with all or a portion of its target sequence. In some embodiments, the region of complementarity includes 1, 2, 3 or more mismatches. In some embodiments, the oligonucleotide comprises a region of complementarity that is complementary (e.g., at least 85% at least 90%, at least 95%, or 100%) to an MLCK1 mRNA target sequence as set forth in SEQ ID NO: 411.

[0459] e. ACVR1 Oligonucleotides

[0460] Examples of oligonucleotides useful for targeting ACVR1 are provided in Star, G. P. et al., “ALK2 and BMPR2 knockdown and endothelin-1 production by pulmonary microvascular endothelial cells”, Microvasc Res. 2013 January; 85:46-53.; Karbiener M. et al., “MicroRNA-30c promotes human adipocyte differentiation and co-represses PAI-1 and ALK2”, RNA Biol. 2011 September-October; 8(5):850-60.; US Patent Application 2018/0087110, published Mar. 29, 2018, “Compositions and methods for xi chromosome reactivation”; US Patent Application 2009/0253132, published Oct. 8, 2009, “Mutated ACVR1 for diagnosis and treatment of fibrodyplasia ossificans progressiva (FOP)”; WO 2015/152183, published Oct. 8, 2015, “Prophylactic agent and therapeutic agent for fibrodysplasia ossificans progressive”; Lowery, J. W. et al, “Allele-specific RNA Interference in FOP-Silencing the FOP gene”, GENE THERAPY, vol. 19, 2012, pages 701-702; Takahashi, M. et al. “Disease-causing allele-specific silencing against the ALK2 mutants, R206H and G356D, in fibrodysplasia ossificans progressiva” Gene Therapy (2012) 19, 781-785; Shi, S. et al. “Antisense-Oligonucleotide Mediated Exon Skipping in Activin-Receptor-Like Kinase 2: Inhibiting the Receptor That Is Overactive in Fibrodysplasia Ossificans Progressiva” Plos One, July 2013, Vol 8:7, e69096.; US Patent Application 2017/0159056, published Jun. 8, 2017, “Antisense oligonucleotides and methods of use thereof”; U.S. Pat. No. 8,859,752, issued Oct. 4, 2014, “SIRNA-based therapy of Fibrodyplasia Ossificans Progressiva (FOP)”; WO 2004/094636, published Nov. 4, 2004, entitled “Effective sirna knock-down constructs”; and Maruyama, R. and T. Yokota, “Morpholino-Mediated Exon Skipping Targeting Human ACVR1/ALK2 for Fibrodysplasia Ossificans Progressiva” Methods Mol Biol. 2018; 1828:497-502.; the contents of each of which are incorporated herein in their entireties.

[0461] In some embodiments, oligonucleotides may have a region of complementarity to a human ACVR1 sequence, for example, as provided below (Gene ID: 90; NCBI Ref. No: NM_001105.5):

(SEQ ID NO: 429)
CCTTTCCCCTGGAGATTTGAACGCTGCTTGCATGGGAGAAAAGCTACTTA
GAGAAGAAAACGTTCCACTTAGTAACAGAAGAAAAGTCTTGGTTAAAAAG
TTGTCATGAATTTGGCTTTTGGAGAGAGGCAGCAAGCCTGGAGCATTGGT
AAGCGTCACACTGCCAAAGTGAGAGCTGCTGGAGAACTCATAATCCCAGG
AACGCCTCTTCTACTCTCCGAGTACCCCAGTGACCAGAGTGAGAGAAGCT
CTGAACGAGGGCACGCGGCTTGAAGGACTGTGGGCAGATGTGACCAAGAG
CCTGCATTAAGTTGTACAATGGTAGATGGAGTGATGATTCTTCCTGTGCT
TATCATGATTGCTCTCCCCTCCCCTAGTATGGAAGATGAGAAGCCCAAGG
TCAACCCCAAACTCTACATGTGTGTGTGTGAAGGTCTCTCCTGCGGTAAT
GAGGACCACTGTGAAGGCCAGCAGTGCTTTTCCTCACTGAGCATCAACGA
TGGCTTCCACGTCTACCAGAAAGGCTGCTTCCAGGTTTATGAGCAGGGAA
AGATGACCTGTAAGACCCCGCCGTCCCCTGGCCAAGCCGTGGAGTGCTGC
CAAGGGGACTGGTGTAACAGGAACATCACGGCCCAGCTGCCCACTAAAGG
AAAATCCTTCCCTGGAACACAGAATTTCCACTTGGAGGTTGGCCTCATTA
TTCTCTCTGTAGTGTTCGCAGTATGTCTTTTAGCCTGCCTGCTGGGAGTT
GCTCTCCGAAAATTTAAAAGGCGCAACCAAGAACGCCTCAATCCCCGAGA
CGTGGAGTATGGCACTATCGAAGGGCTCATCACCACCAATGTTGGAGACA
GCACTTTAGCAGATTTATTGGATCATTCGTGTACATCAGGAAGTGGCTCT
GGTCTTCCTTTTCTGGTACAAAGAACAGTGGCTCGCCAGATTACACTGTT
GGAGTGTGTCGGGAAAGGCAGGTATGGTGAGGTGTGGAGGGGCAGCTGGC
AAGGGGAGAATGTTGCCGTGAAGATCTTCTCCTCCCGTGATGAGAAGTCA
TGGTTCAGGGAAACGGAATTGTACAACACTGTGATGCTGAGGCATGAAAA
TATCTTAGGTTTCATTGCTTCAGACATGACATCAAGACACTCCAGTACCC
AGCTGTGGTTAATTACACATTATCATGAAATGGGATCGTTGTACGACTAT
CTTCAGCTTACTACTCTGGATACAGTTAGCTGCCTTCGAATAGTGCTGTC
CATAGCTAGTGGTCTTGCACATTTGCACATAGAGATATTTGGGACCCAAG
GGAAACCAGCCATTGCCCATCGAGATTTAAAGAGCAAAAATATTCTGGTT
AAGAAGAATGGACAGTGTTGCATAGCAGATTTGGGCCTGGCAGTCATGCA
TTCCCAGAGCACCAATCAGCTTGATGTGGGGAACAATCCCCGTGTGGGCA
CCAAGCGCTACATGGCCCCCGAAGTTCTAGATGAAACCATCCAGGTGGAT
TGTTTCGATTCTTATAAAAGGGTCGATATTTGGGCCTTTGGACTTGTTTT
GTGGGAAGTGGCCAGGCGGATGGTGAGCAATGGTATAGTGGAGGATTACA
AGCCACCGTTCTACGATGTGGTTCCCAATGACCCAAGTTTTGAAGATATG
AGGAAGGTAGTCTGTGTGGATCAACAAAGGCCAAACATACCCAACAGATG
GTTCTCAGACCCGACATTAACCTCTCTGGCCAAGCTAATGAAAGAATGCT
GGTATCAAAATCCATCCGCAAGACTCACAGCACTGCGTATCAAAAAGACT
TTGACCAAAATTGATAATTCCCTCGACAAATTGAAAACTGACTGTTGACA
TTTTCATAGTGTCAAGAAGGAAGATTTGACGTTGTTGTCATTGTCCAGCT
GGGACCTAATGCTGGCCTGACTGGTTGTCAGAATGGAATCCATCTGTCTC
CCTCCCCAAATGGCTGCTTTGACAAGGCAGACGTCGTACCCAGCCATGTG
TTGGGGAGACATCAAAACCACCCTAACCTCGCTCGATGACTGTGAACTGG
GCATTTCACGAACTGTTCACACTGCAGAGACTAATGTTGGACAGACACTG
TTGCAAAGGTAGGGACTGGAGGAACACAGAGAAATCCTAAAAGAGATCTG
GGCATTAAGTCAGTGGCTTTGCATAGCTTTCACAAGTCTCCTAGACACTC
CCCACGGGAAACTCAAGGAGGTGGTGAATTTTTAATCAGCAATATTGCCT
GTGCTTCTCTTCTTTATTGCACTAGGAATTCTTTGCATTCCTTACTTGCA
CTGTTACTCTTAATTTTAAAGACCCAACTTGCCAAAATGTTGGCTGCGTA
CTCCACTGGTCTGTCTTTGGATAATAGGAATTCAATTTGGCAAAACAAAA
TGTAATGTCAGACTTTGCTGCATTTTACACATGTGCTGATGTTTACAATG
ATGCCGAACATTAGGAATTGTTTATACACAACTTTGCAAATTATTTATTA
CTTGTGCACTTAGTAGTTTTTACAAAACTGCTTTGTGCATATGTTAAAGC
TTATTTTTATGTGGTCTTATGATTTTATTACAGAAATGTTTTTAACACTA
TACTCTAAAATGGACATTTTCTTTTATTATCAGTTAAAATCACATTTTAA
GTGCTTCACATTTGTATGTGTGTAGACTGTAACTTTTTTTCAGTTCATAT
GCAGAACGTATTTAGCCATTACCCACGTGACACCACCGAATATATTACTG
ATTTAGAAGCAAAGATTTCAGTAGAATTTTAGTCCTGAACGCTACGGGGA
AAATGCATTTTCTTCAGAATTATCCATTACGTGCATTTAAACTCTGCCAG
AAAAAAATAACTATTTTGTTTTAATCTACTTTTTGTATTTAGTAGTTATT
TGTATAAATTAAATAAACTGTTTTCAAGTCAAA.

[0462] In some embodiments, oligonucleotides may have a region of complementarity to a sequence set forth as follows, which is an example mouse ACVR1 gene sequence (Gene ID 11477; NM_001110204.1)

(SEQ ID NO: 430)
CCGCCTCCCCGGGTTCAGCACCCGACCGCCGCTGGACCAGAGGAACAAAG
GAGCTGCCCCCGTGTCACCCAGCCCTTCAGTGGAAGTCTGGAAAAGGAAC
AGAGGTGATATTGCAGTGGATGAGCAGAGAGAAGCCGGCCTCTGGTGCTC
TTGAGCTGGTCTGCCCATAGGGAGCCTGCTGGGAGAAGGTACAGCTTCCG
GAAGACTCCTCCCGGAGCGCCTCTCCCATCCTCCTCTCCCTTGGAGCAGT
CAGTACCTCTCTGCTGGAGGATCTGGGCTGGGTGTGCCGGGAGCTGGCTT
TAACTGTAGCCCTGTCAGGCTTTCCCCGGACCTCGCGGAAGAGCGTCACC
AGCCCCCACGGCTTTCCAACACATCACCTCTTTTCATGCCGTTTGGCACA
GATCGAATCTACAGGGATGAATGGATCCAGGGTCTGGTTTTAAGTTCTAT
GGTAGTCGTCCAAGGAGCCATTGGTATTCATCTAACGCAAACGATCAAGT
TACATTCTGAAAGTAACATCCCACCAGAAACCCTCCAGCAGCAGTCACGT
CTGTGTAAAGCCAAGCCCTGGCATGCGCACTGCCAGGTCAGAGTGTGGTG
GTACACGTGTTTAACAGGTCATTTGTCAACTGAAGGAAAGACCCCGGCTT
GACTTACCTGTTATACAATGGTCGATGGAGTAATGATCCTTCCTGTGCTA
ATGATGATGGCTTTCCCTTCCCCGAGTGTGGAAGATGAGAAGCCCAAGGT
CAACCAGAAACTTTACATGTGTGTGTGTGAGGGCCTCTCCTGCGGGAACG
AGGACCACTGTGAAGGCCAGCAGTGTTTTTCTTCTCTGAGCATCAACGAT
GGCTTCCACGTCTACCAGAAGGGCTGCTTTCAGGTTTATGAGCAGGGGAA
GATGACGTGTAAGACCCCGCCGTCACCTGGCCAGGCTGTGGAGTGCTGCC
AAGGGGACTGGTGTAACAGGAACATCACGGCCCAGCTGCCCACTAAAGGG
AAGTCCTTCCCCGGAACACAGAATTTCCACCTGGAAGTTGGCCTTATCAT
CCTCTCGGTGGTGTTTGCAGTATGTCTTTTAGCTTGCATCCTTGGAGTTG
CTCTCAGGAAGTTTAAGAGACGCAATCAAGAGCGCCTGAACCCCAGAGAC
GTGGAGTATGGTACCATTGAAGGGCTCATCACCACCAATGTGGGAGACAG
CACTCTAGCGGAACTACTAGATCACTCGTGTACATCAGGAAGTGGCTCCG
GTCTTCCTTTCCTGGTACAGAGAACGGTGGCTCGCCAGATAACCCTGTTG
GAGTGTGTCGGGAAGGGCCGGTATGGAGAAGTATGGAGGGGCAGCTGGCA
AGGCGAAAATGTCGCTGTGAAGATCTTCTCCTCCCGAGACGAGAAGTCAT
GGTTCAGGGAGACGGAATTGTACAACACTGTGATGTTGAGGCATGAAAAT
ATCTTAGGTTTCATCGCTTCAGACATGACCTCCAGACACTCCAGTACCCA
GCTGTGGCTCATCACACATTACCATGAAATGGGATCGTTGTATGACTACC
TTCAGCTCACTACTCTGGATACGGTTAGCTGCCTTCGGATTGTACTGTCC
ATAGCCAGCGGCCTTGCCCATTTGCACATAGAGATATTTGGGACCCAAGG
GAAGTCCGCCATTGCCCATCGAGATCTGAAGAGCAAAAACATCCTGGTGA
AGAAGAATGGACAGTGCTGCATAGCAGATTTGGGCCTGGCAGTCATGCAT
TCCCAGAGCACAAACCAGCTTGATGTGGGAAACAACCCCCGTGTGGGGAC
CAAGCGCTACATGGCTCCGGAAGTGCTCGATGAAACCATCCAAGTGGATT
GCTTTGATTCTTATAAGAGGGTCGATATTTGGGCCTTTGGCCTTGTTCTG
TGGGAAGTGGCCAGGCGAATGGTGAGCAATGGTATAGTGGAAGATTACAA
GCCACCATTCTATGATGTGGTTCCCAATGACCCAAGTTTTGAAGATATGA
GGAAAGTTGTCTGTGTGGATCAACAGAGGCCAAACATACCTAACAGATGG
TTCTCAGACCCGACATTAACTTCTCTGGCGAAGCTGATGAAAGAGTGCTG
GTATCAGAACCCATCCGCAAGACTCACAGCTCTACGTATCAAAAAGACTT
TGACCAAAATCGATAATTCCCTAGACAAATTAAAAACTGACTGTTGACCT
TGTCACCGGTGTCAAGAAGGAGAGTCAATGCTGTCCTTGTCCAGCTGGGA
CCTAATGCTGGCCTGACTGGTTGTCAGAACAGAATCCATCTGACCCCCTT
CCCGAAGTGGCTGCTTTGACGGAAGCAGATGTCTCTTCCCAGCCATGTTC
CAGGGGGAGACACCAAAACCACCCTAACCTCGCTCAAAAACTGTGACTCG
AGCCCTCGATGAACTGTTCACACCACAAAGACTTAACGGTGGGCAGGTCT
GGTGGCAAGGGGGAGGGAAGTGGAGGAACCCGGAAAGATCCTGCAGGCGA
TCTGGGCATTAAGACAGTGGCTCTCTGCGTATCTTTCGCGGGTCTCCTAG
ACACTCCCCACGGGAAGCTCAAGGAGGCGGTGAATTCGTAATCAGCAATA
TCGGCTGCATCTACTCTTCGTTGCACTAGGAATTCTGTGCATTCCTTACT
TGCACTGTGGCCCTTAATCTTAAAGACCCAACTTGCCAAAACATTGGCTG
CGTACTCCACTGGCCTGTCTCTGGATAATAGGAATTCAATCTGGCAACAC
AAAAATGTACCGTTGGACTCTGCTGCATTTTACACACGTGCTGATGTTTA
CAAGGATGCGAACATTAGGAATTGTTTAGACACAACTTTGCAAATTATTT
ATTACTGGTGCACTTAGCGGTTTGTTTGAAACCGCCTCGTGCATATGTTA
AAGCTTATTTTTATGTGGTCTTATGATTTTATTACCGAAATGTTTTTAAC
ACCCAACTCTGAAACGGACATTTTCTTTTATTATCAGTTAAATTCACATT
TAAGTGCTTCACATTTTTTTTTTTAAATGTGTGTAGACTGTAACTTTCTT
TTCAGTTCGTATGCAGAACATATTTAGCCATTACCCATGCAACACCACCC
GATATATTACTGATTTAGAAGCAAAGATTTCAGTAGAATTTTAGTCCCAA
ACGCTGTGGGGGGAAATGCATCTTCTTCGGAATTATCCATTACGTGCATT
TAAACTCTGCCAGAAAAAAAAATAACTATTTTGTTTTAATCTACTTTTTG
TATTTAGTAGTTATTTGTATAAATTAAATAAACTGTTTTCAAGTCAAAAA
AAAAAAAAAAAA

[0463] In some embodiments, an oligonucleotide comprises a region of complementarity to an ACVR1 sequence as set forth in SEQ ID NO: 429 or SEQ ID NO: 430. In some embodiments, the oligonucleotide comprises a region of complementarity that is at least 80%, 85%, 90%, 95%, 96%, 97%, 98%, 99%, or 100% complementary to an ACVR1 sequence as set forth in SEQ ID NO: 429 or SEQ ID NO: 430. In some embodiments, the oligonucleotide comprises a sequence that has at least 10, 11, 12, 13, 14, 15, 16, 17, 18, or 19 consecutive nucleotides that are perfectly complementary to an ACVR1 sequence as set forth in SEQ ID NO: 429 or SEQ ID NO: 430. In some embodiments, an oligonucleotide may comprise a sequence that targets (e.g., is complementary to) an RNA version (i.e., wherein the T's are replaced with U's) of an ACVR1 sequence as set forth in SEQ ID NO: 429 or SEQ ID NO: 430. In some embodiments, the oligonucleotide comprises a sequence that is complementary (e.g., at least 80%, 85%, 90%, 95%, 96%, 97%, 98%, 99%, or 100% complementary) to an RNA version of an ACVR1 sequence as set forth in SEQ ID NO: 429 or SEQ ID NO: 430. In some embodiments, the oligonucleotide comprises a sequence that has at least 10, 11, 12, 13, 14, 15, 16, 17, 18, or 19 consecutive nucleotides that are perfectly complementary to an RNA version of an ACVR1 sequence as set forth in SEQ ID NO: 429 or SEQ ID NO: 430.

[0464] In some embodiments, an ACVR1-targeting oligonucleotide comprises an antisense strand that comprises at least 10, 11, 12, 13, 14, 15, 16, 17, 18, or 19 consecutive nucleotides of a sequence comprising any one of SEQ ID NOs: 479-502. In some embodiments, an ACVR1-targeting oligonucleotide comprises an antisense strand that comprises any one of SEQ ID NOs: 479-502. In some embodiments, an ACVR1-targeting oligonucleotide comprises an antisense strand that comprises shares at least 70%, 75%, 80%, 85%, 90%, 95%, or 97% sequence identity with at least 12 or at least 15 consecutive nucleotides of any one of SEQ ID NOs: 479-502.

[0465] In some embodiments, an ACVR1-targeting oligonucleotide comprises an antisense strand that targets an ACVR1 sequence comprising any one of SEQ ID NOs: 431-478. In some embodiments, an oligonucleotide comprises an antisense strand comprising at least 10, 11, 12, 13, 14, 15, 16, 17, 18, or 19 nucleotides (e.g., consecutive nucleotides) that are complementary to an ACVR1 sequence comprising any one of SEQ ID NOs: 431-478. In some embodiments, an ACVR1-targeting oligonucleotide comprises an antisense strand comprising a sequence that is at least 70%, 75%, 80%, 85%, 90%, 95%, or 97% complementary with at least 12 or at least 15 consecutive nucleotides of any one of SEQ ID NOs: 431-478.

[0466] In some embodiments, an ACVR1-targeting oligonucleotide comprises an antisense strand comprises a region of complementarity to a target sequence as set forth in any one of SEQ ID NOs: 431-478. In some embodiments, the region of complementarity is at least 8, at least 9, at least 10, at least 11, at least 12, at least 13, at least 14, at least 15, at least 16, at least 17, or at least 19 nucleotides in length. In some embodiments, the region of complementarity is 8, 9, 10, 11, 12, 13, 14, 15, 16, 17, 18, or 19 nucleotides in length. In some embodiments, the region of complementarity is in the range of 8 to 20, 10 to 20 or 15 to 20 nucleotides in length. In some embodiments, the region of complementarity is fully complementary with all or a portion of its target sequence. In some embodiments, the region of complementarity includes 1, 2, 3 or more mismatches.

[0467] In some embodiments, an ACVR1-targeting oligonucleotide further comprises a sense strand that hybridizes to the antisense strand to form a double stranded siRNA. In some embodiments, the ACVR1-targeting oligonucleotide comprises an antisense strand that comprises the nucleotide sequence of any one of SEQ ID NOs: 479-502. In some embodiments, the ACVR1-targeting oligonucleotide further comprises a sense strand that comprises the nucleotide sequence of any one of SEQ ID NOs: 455-478.

[0468] In some embodiments, the ACVR1-targeing oligonucleotide is a double stranded oligonucleotide (e.g., an siRNA) comprising an antisense strand that comprises the nucleotide sequence of any one of SEQ ID NOs: 479-502 and a sense strand that hybridizes to the antisense strand and comprises the nucleotide sequence of any one of SEQ ID NOs: 455-478, wherein the antisense strand and/or (e.g., and) comprises one or more modified nucleosides (e.g., 2′-modified nucleosides). In some embodiment, the one or more modified nucleosides are selected from 2′-O-Me and 2′-F modified nucleosides.

[0469] In some embodiments, the ACVR1-targeing oligonucleotide is a double stranded oligonucleotide (e.g., an siRNA) comprising an antisense strand that comprises the nucleotide sequence of any one of SEQ ID NOs: 479-502 and a sense strand that hybridizes to the antisense strand and comprises the nucleotide sequence of any one of SEQ ID NOs: 455-478, wherein the each nucleoside in the antisense strand and/or (e.g., and) each nucleoside in the sense strand is a 2′-modified nucleoside selected from 2′-O-Me and 2′-F modified nucleosides.

[0470] In some embodiments, the ACVR1-targeing oligonucleotide is a double stranded oligonucleotide (e.g., an siRNA) comprising an antisense strand that comprises the nucleotide sequence of any one of SEQ ID NOs: 479-502 and a sense strand that hybridizes to the antisense strand and comprises the nucleotide sequence of any one of SEQ ID NOs: 455-478, wherein the each nucleoside in the antisense strand and each nucleoside in the sense strand is a 2′-modified nucleoside selected from 2′-O-Me and 2′-F modified nucleosides, and wherein the antisense strand and/or (e.g., and) the sense strand each comprises one or more phosphorothioate internucleoside linkages. In some embodiments, the sense strand does not comprise any phosphorothioate internucleoside linkages (all the internucleoside linkages in the sense strand are phosphodiester internucleoside linkages), and the antisense strand comprises 1, 2, or 3 phosphorothioate internucleoside linkages. In some embodiments, the antisense strand comprises 2 phosphorothioate internucleoside linkages, optionally wherein the two internucleoside linkages at the 3′ end of the antisense strand are phosphorothioate internucleoside linkages and the rest of the internucleoside linkages in the antisense strand are phosphodiester internucleoside linkages,

[0471] In some embodiments, the antisense strand of the ACVR1-targeing oligonucleotide comprises a structure of (5′ to 3′): fNfNmNfNmNfNmNfNmNfNmNfNmNfNmNfNmNfNmNfNmN*fN*mN, wherein “mN” indicates 2′-O-methyl (2′-O-Me) modified nucleosides; “fN” indicates 2′-fluoro (2′-F) modified nucleosides; “*” indicates phosphrothioate internucleoside linkage; and the absence of “*” between two nucleosides indicate phosphodiester internucleoside linkage.

[0472] In some embodiments, the sense strand of the ACVR1-targeing oligonucleotide comprises a structure of (5′ to 3′): mNmNfNmNfNmNfNmNfNmNfNmNfNmNfNmNfNmNfNmNfN, wherein “mN” indicates 2′-O-methyl (2′-O-Me) modified nucleosides; “fN” indicates 2′-fluoro (2′-F) modified nucleosides; and the absence of “*” between two nucleosides indicate phosphodiester internucleoside linkage.

[0473] In some embodiments, the antisense strand of the ACVR1-targeing oligonucleotide is selected from the modified version of SEQ ID NOs: 479-502 listed in Table 19. In some embodiments, the sense strand of the ACVR1-targeing oligonucleotide is selected from the modified version of SEQ ID NOs: 455-478 listed in Table 19. In some embodiments, the ACVR1-targeing oligonucleotide is a siRNA selected from the siRNAs listed in Table 19.

TABLE 17
ACVRI Target Sequences

| Corresponding | | |
|---|---|---|
| nucleotides of | | |
| Sequence NM_001105.5 | | SEQ |
| (SEQ ID NO: 429) | ACVR1 Target Sequence | ID NO: |
| 877-895 | TCGTGTACATCAGGAAGTG | 431 |
| 878-896 | CGTGTACATCAGGAAGTGG | 432 |
| 1380-1398 | TTTGGGCCTGGCAGTCATG | 433 |
| 1573-1591 | GTGAGCAATGGTATAGTGG | 434 |
| 1486-1704 | TGAGCAATGGTATAGTGGA | 435 |
| 1574-1592 | CCCAAGTTTTGAAGATATG | 436 |
| 1633-1651 | CCAAGTTTTGAAGATATGA | 437 |
| 1693-1711 | AACAGATGGTTCTCAGACC | 438 |
| 1696-1714 | AGATGGTTCTCAGACCCGA | 439 |
| 1904-1922 | ACCTAATGCTGGCCTGACT | 440 |
| 2484-2502 | TTGCAAATTATTTATTACT | 441 |
| 2617-2635 | TTTTCTTTTATTATCAGTT | 442 |
| 2667-2685 | TGTGTGTAGACTGTAACTT | 443 |
| 2742-2760 | ATATTACTGATTTAGAAGC | 444 |
| 2752-2770 | TTTAGAAGCAAAGATTTCA | 445 |
| 2757-2775 | AAGCAAAGATTTCAGTAGA | 446 |
| 2758-2776 | AGCAAAGATTTCAGTAGAA | 447 |
| 2759-2777 | GCAAAGATTTCAGTAGAAT | 448 |
| 2760-2778 | CAAAGATTTCAGTAGAATT | 449 |
| 2834-2852 | CATTTAAACTCTGCCAGAA | 450 |
| 2859-2877 | AACTATTTTGTTTTAATCT | 451 |
| 2882-2900 | TTTGTATTTAGTAGTTATT | 452 |
| 2912-2930 | AATAAACTGTTTTCAAGTC | 453 |
| 2913-2931 | ATAAACTGTTTTCAAGTCA | 454 |

*The target sequences contain Ts, but binding to RNA
and/or DNA is contemplated.

[0474] In some embodiments, an oligonucleotide may comprise or consist of any sequence as provided in Table 18.

TABLE 18
Oligonucleotide sequences for targeting ACVR1

| Passenger | SEQ | | SEQ |
|---|---|---|---|
| strand (RNA)/ | ID | Guide strand (RNA)/ | ID |
| Sense strand | NO: | Antisense strand | NO: |
| AUUCGUGUACAUCAGGAAGUG | 455 | CACUUCCUGAUGUACACGAAUGA | 479 |
| UUCGUGUACAUCAGGAAGUGG | 456 | CCACUUCCUGAUGUACACGAAUG | 480 |
| GAUUUGGGCCUGGCAGUCAUG | 457 | CAUGACUGCCAGGCCCAAAUCUG | 481 |
| UGGUGAGCAAUGGUAUAGUGG | 458 | CCACUAUACCAUUGCUCACCAUC | 482 |
| GGUGAGCAAUGGUAUAGUGGA | 459 | UCCACUAUACCAUUGCUCACCAU | 483 |
| GACCCAAGUUUUGAAGAUAUG | 460 | CAUAUCUUCAAAACUUGGGUCAU | 484 |
| ACCCAAGUUUUGAAGAUAUGA | 461 | UCAUAUCUUCAAAACUUGGGUCA | 485 |
| CCAACAGAUGGUUCUCAGACC | 462 | GGUCUGAGAACCAUCUGUUGGGU | 486 |
| ACAGAUGGUUCUCAGACCCGA | 463 | UCGGGUCUGAGAACCAUCUGUUG | 487 |
| GGACCUAAUGCUGGCCUGACU | 464 | AGUCAGGCCAGCAUUAGGUCCCA | 488 |
| CUUUGCAAAUUAUUUAUUACU | 465 | AGUAAUAAAUAAUUUGCAAAGUU | 489 |
| CAUUUUCUUUUAUUAUCAGUU | 466 | AACUGAUAAUAAAAGAAAAUGUC | 490 |
| UAUGUGUGUAGACUGUAACUU | 467 | AAGUUACAGUCUACACACAUACA | 491 |
| AUAUAUUACUGAUUUAGAAGC | 468 | GCUUCUAAAUCAGUAAUAUAUUC | 492 |
| GAUUUAGAAGCAAAGAUUUCA | 469 | UGAAAUCUUUGCUUCUAAAUCAG | 493 |
| AGAAGCAAAGAUUUCAGUAGA | 470 | UCUACUGAAAUCUUUGCUUCUAA | 494 |
| GAAGCAAAGAUUUCAGUAGAA | 471 | UUCUACUGAAAUCUUUGCUUCUA | 495 |
| AAGCAAAGAUUUCAGUAGAAU | 472 | AUUCUACUGAAAUCUUUGCUUCU | 496 |
| AGCAAAGAUUUCAGUAGAAUU | 473 | AAUUCUACUGAAAUCUUUGCUUC | 497 |
| UGCAUUUAAACUCUGCCAGAA | 474 | UUCUGGCAGAGUUUAAAUGCACG | 498 |
| AUAACUAUUUUGUUUUAAUCU | 475 | AGAUUAAAACAAAAUAGUUAUUU | 499 |
| UUUUUGUAUUUAGUAGUUAUU | 476 | AAUAACUACUAAAUACAAAAAGU | 500 |
| UAAAUAAACUGUUUUCAAGUC | 477 | GACUUGAAAACAGUUUAUUUAAU | 501 |
| AAAUAAACUGUUUUCAAGUCA | 478 | UGACUUGAAAACAGUUUAUUUAA | 502 |

[0475] In some embodiments, an oligonucleotide is a modified oligonucleotide as provided in Table 19, wherein ‘mN’ represents a 2′-O-methyl modified nucleoside (e.g., mU is 2′-O-methyl modified uridine), ‘fN’ represents a 2′-fluoro modified nucleoside (e.g., fU is 2′-fluoro modified uridine), ‘*’ represents a phosphorothioate internucleoside linkage, and lack of “*” between nucleosides indicate phosphodiester internucleoside linkage.

TABLE 19
Modified Oligonucleotides for targeting ACVR1

| | Modified Passenger | | Modified Guide strand/ | |
|---|---|---|---|---|
| siRNA # | strand/Sense strand | SEQ ID NO: | Antisense strand | SEQ ID NO: |
| hsACVR1-24 | mAmUfUmCfGmUfGmUfAmCf | 455 | fCfAmCfUmUfCmCfUmGfAm | 479 |
| | AmUfCmAfGmGfAmAfGmUfG | | UfGmUfAmCfAmCfGmAfAm | |
| | | | U*fG*mA | |
| hsACVR1-14 | mUmUfCmGfUmGfUmAfCmAf | 456 | fCfCmAfCmUfUmCfCmUfGm | 480 |
| | UmCfAmGfGmAfAmGfUmGfG | | AfUmGfUmAfCmAfCmGfAm | |
| | | | A*fU*mG | |
| hsACVR1-22 | mGmAfUmUfUmGfGmGfCmCf | 457 | fCfAmUfGmAfCmUfGmCfCm | 481 |
| | UmGfGmCfAmGfUmCfAmUfG | | AfGmGfCmCfCmAfAmAfUmC | |
| | | | *fU*mG | |
| hsACVR1-23 | mUmGfGmUfGmAfGmCfAmAf | 458 | fCfCmAfCmUfAmUfAmCfCm | 482 |
| | UmGfGmUfAmUfAmGfUmGfG | | AfUmUfGmCfUmCfAmCfCmA | |
| | | | *fU*mC | |
| hsACVR1-18 | mGmGfUmGfAmGfCmAfAmUf | 459 | fUfCmCfAmCfUmAfUmAfCm | 483 |
| | GmGfUmAfUmAfGmUfGmGfA | | CfAmUfUmGfCmUfCmAfCmC | |
| | | | *fA*mU | |
| hsACVR1-13 | mGmAfCmCfCmAfAmGfUmUf | 460 | fCfAmUfAmUfCmUfUmCfAm | 484 |
| | UmUfGmAfAmGfAmUfAmUfG | | AfAmAfCmUfUmGfGmGfUm | |
| | | | C*fA*mU | |
| hsACVR1-7 | mAmCfCmCfAmAfGmUfUmUf | 461 | fUfCmAfUmAfUmCfUmUfCm | 485 |
| | UmGfAmAfGmAfUmAfUmGfA | | AfAmAfAmCfUmUfGmGfGm | |
| | | | U*fC*mA | |
| hsACVR1-20 | mCmCfAmAfCmAfGmAfUmGf | 462 | fGfGmUfCmUfGmAfGmAfAm | 486 |
| | GmUfUmCfUmCfAmGfAmCfC | | CfCmAfUmCfUmGfUmUfGm | |
| | | | G*fG*mU | |
| hsACVR1-11 | mAmCfAmGfAmUfGmGfUmUf | 463 | fUfCmGfGmGfUmCfUmGfAm | 487 |
| | CmUfCmAfGmAfCmCfCmGfA | | GfAmAfCmCfAmUfCmUfGm | |
| | | | U*fU*mG | |
| hsACVR1-16 | mGmGfAmCfCmUfAmAfUmGf | 464 | fAfGmUfCmAfGmGfCmCfAm | 488 |
| | CmUfGmGfCmCfUmGfAmCfU | | GfCmAfUmUfAmGfGmUfCm | |
| | | | C*fC*mA | |
| hsACVR1-6 | mCmUfUmUfGmCfAmAfAmUf | 465 | fAfGmUfAmAfUmAfAmAfUm | 489 |
| | UmAfUmUfUmAfUmUfAmCfU | | AfAmUfUmUfGmCfAmAfAm | |
| | | | G*fU*mU | |
| hsACVR1-8 | mCmAfUmUfUmUfCmUfUmUf | 466 | fAfAmCfUmGfAmUfAmAfUm | 490 |
| | UmAfUmUfAmUfCmAfGmUfU | | AfAmAfAmGfAmAfAmAfUm | |
| | | | G*fU*mC | |
| hsACVR1-15 | mUmAfUmGfUmGfUmGfUmAf | 467 | fAfAmGfUmUfAmCfAmGfUm | 491 |
| | GmAfCmUfGmUfAmAfCmUfU | | CfUmAfCmAfCmAfCmAfUmA | |
| | | | *fC*mA | |
| hsACVR1-21 | mAmUfAmUfAmUfUmAfCmUf | 468 | fGfCmUfUmCfUmAfAmAfUm | 492 |
| | GmAfUmUfUmAfGmAfAmGfC | | CfAmGfUmAfAmUfAmUfAm | |
| | | | U*fU*mC | |
| hsACVR1-5 | mGmAfUmUfUmAfGmAfAmGf | 469 | fUfGmAfAmAfUmCfUmUfUm | 493 |
| | CmAfAmAfGmAfUmUfUmCfA | | GfCmUfUmCfUmAfAmAfUm | |
| | | | C*fA*mG | |
| hsACVR1-10 | mAmGfAmAfGmCfAmAfAmGf | 470 | fUfCmUfAmCfUmGfAmAfAm | 494 |
| | AmUfUmUfCmAfGmUfAmGfA | | UfCmUfUmUfGmCfUmUfCm | |
| | | | U*fA*mA | |
| hsACVR1-4 | mGmAfAmGfCmAfAmAfGmAf | 471 | fUfUmCfUmAfCmUfGmAfAm | 495 |
| | UmUfUmCfAmGfUmAfGmAfA | | AfUmCfUmUfUmGfCmUfUm | |
| | | | C*fU*mA | |
| hsACVR1-3 | mAmAfGmCfAmAfAmGfAmUf | 472 | fAfUmUfCmUfAmCfUmGfAm | 496 |
| | UmUfCmAfGmUfAmGfAmAfU | | AfAmUfCmUfUmUfGmCfUm | |
| | | | U*fC*mU | |
| hsACVR1-1 | mAmGfCmAfAmAfGmAfUmUf | 473 | fAfAmUfUmCfUmAfCmUfGm | 497 |
| | UmCfAmGfUmAfGmAfAmUfU | | AfAmAfUmCfUmUfUmGfCm | |
| | | | U*fU*mC | |
| hsACVR1-17 | mUmGfCmAfUmUfUmAfAmAf | 474 | fUfUmCfUmGfGmCfAmGfAm | 498 |
| | CmUfCmUfGmCfCmAfGmAfA | | GfUmUfUmAfAmAfUmGfCm | |
| | | | A*fC*mG | |
| hsACVR1-12 | mAmUfAmAfCmUfAmUfUmUf | 475 | fAfGmAfUmUfAmAfAmAfCm | 499 |
| | UmGfUmUfUmUfAmAfUmCfU | | AfAmAfAmUfAmGfUmUfAm | |
| | | | U*fU*mU | |
| hsACVR1-2 | mUmUfUmUfUmGfUmAfUmUf | 476 | fAfAmUfAmAfCmUfAmCfUm | 500 |
| | UmAfGmUfAmGfUmUfAmUfU | | AfAmAfUmAfCmAfAmAfAm | |
| | | | A*fG*mU | |
| hsACVR1-19 | mUmAfAmAfUmAfAmAfCmUf | 477 | fGfAmCfUmUfGmAfAmAfAm | 501 |
| | GmUfUmUfUmCfAmAfGmUfC | | CfAmGfUmUfUmAfUmUfUm | |
| | | | A*fA*mU | |
| hsACVR1-9 | mAmAfAmUfAmAfAmCfUmGf | 478 | fUfGmAfCmUfUmGfAmAfAm | 502 |
| | UmUfUmUfCmAfAmGfUmCfA | | AfCmAfGmUfUmUfAmUfUm | |
| | | | U*fA*mA | |

[0476] f. FBXO32 Oligonucleotides

[0477] Examples of oligonucleotides useful for targeting FBXO32 are provided in Cong et al., Hum Gene Ther. 2011 March; 22(3):313-24; Castillero et al., Metabolism. 2013; October; 62(10):1495-502; Wada et al., Nature Precedings 2008; Lagirand-Cantaloube et al., PLoS One. 2009; 4(3):e4973; U.S. Pat. No. 8,097,596, entitled, “COMPOSITIONS AND METHODS FOR THE TREATMENT OF MUSCLE WASTING,” ISSUED ON Jan. 17, 2012; WO2019139351, entitled, “PHARMACEUTICAL COMPOSITION FOR PREVENTING OR TREATING MUSCULAR DISEASE OR CACHEXIA COMPRISING, AS ACTIVE INGREDIENT, MIRNA LOCATED IN DLK1-DIO3 CLUSTER OR VARIANT THEREOF,” which was published on Jul. 18, 2019; WO2008156561, entitled, “METHODS AND COMPOSITIONS FOR THE TREATMENT AND DIAGNOSIS OF STATIN-INDUCED MYOPATHY,” which was published on Dec. 24, 2008; and WO2019113393, entitled, “COMPOSITIONS AND METHODS OF TREATING MUSCLE ATROPHY AND MYOTONIC DYSTROPHY,” which was published on Jun. 13, 2019, the contents of each of which are incorporated herein in their entireties. In some embodiments, the oligonucleotide is a CRISPR guide RNA targeting FBXO32.

[0478] In some embodiments, oligonucleotides may have a region of complementarity to a human FBXO32 sequence, for example, as provided below (Gene ID: 114907; NCBI Ref. No: NM_058229.4):

(SEQ ID NO: 505)
AGCACTCCCGGAGCCTGCAACGCTTGAGATCCTCTCCGCGCCCGCCACCCCGCAGGGTGCCCCGCGCCGTTCCCGCCGCCCCG
CCGCCCCCGTCGCGGGCCCCTGCACCCCGAGCATCCGCCCCGGGTGGCACGTCCCCGAGCCCACCAGGCCGGCCCCGTCTCCC
CATCCGTCTAGTCCGCTCGCGGTGCCATGCCATTCCTCGGGCAGGACTGGCGGTCCCCCGGGCAGAACTGGGTGAAGACGGCC
GACGGCTGGAAGCGCTTCCTGGATGAGAAGAGCGGCAGTTTCGTGAGCGACCTCAGCAGTTACTGCAACAAGGAGGTATACAA
TAAGGAGAATCTTTTCAACAGCCTGAACTATGATGTTGCAGCCAAGAAGAGAAAGAAGGACATGCTGAATAGCAAAACCAAAA
CTCAGTATTTCCACCAAGAAAAATGGATCTATGTTCACAAAGGAAGTACTAAAGAGCGCCATGGATATTGCACCCTGGGGGAA
GCTTTCAACAGACTGGACTTCTCAACTGCCATTCTGGATTCCAGAAGATTTAACTACGTGGTCCGGCTGTTGGAGCTGATAGC
AAAGTCACAGCTCACATCCCTGAGTGGCATCGCCCAAAAGAACTTCATGAATATTTTGGAAAAAGTGGTACTGAAAGTCCTTG
AAGACCAGCAAAACATTAGACTAATAAGGGAACTACTCCAGACCCTCTACACATCCTTATGTACACTGGTCCAAAGAGTCGGC
AAGTCTGTGCTGGTCGGGAACATTAACATGTGGGTGTATCGGATGGAGACGATTCTCCACTGGCAGCAGCAGCTGAACAACAT
TCAGATCACCAGGCCTGCCTTCAAAGGCCTCACCTTCACTGACCTGCCTTTGTGCCTACAACTGAACATCATGCAGAGGCTGA
GCGACGGGCGGGACCTGGTCAGCCTGGGCCAGGCTGCCCCCGACCTGCACGTGCTCAGCGAAGACCGGCTGCTGTGGAAGAAA
CTCTGCCAGTACCACTTCTCCGAGCGGCAGATCCGCAAACGATTAATTCTGTCAGACAAAGGGCAGCTGGATTGGAAGAAGAT
GTATTTCAAACTTGTCCGATGTTACCCAAGGAAAGAGCAGTATGGAGATACCCTTCAGCTCTGCAAACACTGTCACATCCTTT
CCTGGAAGGGCACTGACCATCCGTGCACTGCCAATAACCCAGAGAGCTGCTCCGTTTCACTTTCACCCCAGGACTTTATCAAC
TTGTTCAAGTTCTGAATCCCAGCACATGACAACACTTCAGAAGGGTCCCCCTGCTGACTGGAGAGCTGGGAATATGGCATTTG
GACACTTCATTTGTAAATAGTGTACATTTTAAACATTGGCTCGAAACTTCAGAGATAAGTCATGGAGAGGACATTGGAGGGGA
GAAATGCAGTTGCTGACTGGGAATTTAAGAATGTGAACTTCTCACTAGAATTGGTATGGAAAAGCAAAATACTGTAAATAAAC
TTTTTTTCTAACAATTTGCCAGCAAGACTATAAGGGCAATAATTCTATTTCAGCGGTGAAAATGGAGTCCTCTTAATGGTCAC
AGAAACTCTCTTATAGTTCCCTAGGAAGAAAAAGGCAAAACTCAAATACAAAATAGGACGCTTTGTTTACAATGTGAAAATTT
GTTTAGAAAAGAAAAAATGAAGAAGGAAAACTATATAGGAGAAATTCCTGGGCTTTGGGGTTTGATCTGGTGTTTGTTTTGAG
AAGGCGAAGGAAGCGCCACCCATCCTAAACCTGCATGGGCACAGAGCCTTACCCTACAGAGATACCACACAATGGTCTACCTC
TAAAAGCGTAGAGTGCCCTCTCTGACAACGCATGTGATCCAGTAGGCAGTGTCTGTTTTTCTCGTAAGTGTTTTCATCACTAT
AAAAAGTGATTTAAAATGGAAAGGGATATTGGAGGCAATCCTCTGGTTTCACACTTCCTTTTCAGGCAAACAGGGCCCTCCTT
AGAGTTATCTGTTCACCAGAACAACCCAAAAGCACATGTTCCTTTTTTCCTGTCATGTTGTAGCTCATTTGGGGGAAAAGAAG
GCCAACTTAAAACAGTCCCAGGGGAGGATTGCTTGAGCCCAGGAGTCTGAGGTTTGCAGTGAGCTATGATTGTGCCACTGCAC
TCCAGCCTGTCTCCAAAACAAAACAAAACAAAACAAAAGCCGTCCCAGAGGAAGTCCTGCTGCAGAAAAGATGATAGAATTGG
TCACCCAATCAATAGCTGTGAAGACTTCCTTATTCCTGCTGAACTTCCTTCCTTGGATATCTTCATGGATAAGCCTGTGTCTG
TGGACAGAGTGGGGCCCAAGTGCTGAGGCTCGAAAGACAGGTTTTACAATCAGCCAATTAAACATCTTACCAGTTGCTGTACC
CCTTGCCAAGGGGATGAGCTGAGGAGCTTCTTTTCTTTAGGTCCAACATCAAAATGAGTCCATCTGAGCTAGGGCTTTTTGCA
AAGGTGATTAAAAATCAAGGCTGGAGTTCCAGCCAAATAGGGAGGAGAGGTACCACAAGTTCATCTTAAACTTGCTTCCGGGC
TGGGTAGTTAAAACAGGAAGATCCCAAGGGGATCTTACGAGGCAAATATCAGCAGGTAACTGTGGAAGAAAGGAAATCTCAGG
ACCTAATGAGTTCGTTGTAAAATATTCCTGGGAATAGATGGGGGATCTACTCCCAGTTTTTTACTTTTTACAGAATATTGTTG
CTTTCCTACAACAATGTACATATATTTGCAGTTGTATATGCTTTTTTTTTTTCCAAATAAACTTGTCACCCTGCATGCCCTTG
GCAAATAAGTGAAGCAGAAATAGGAACACAGTCCACATTCAAGTTGAGGAACAGTGTATCTTTAAGAGCTGAGCTTTGGGTGA
CCTGGAAAGGGGGAAAGATGGCTAAGCATGGAGAGAAACGAGGCAAGAGACAAGCTATGATACAACACCGCTTCAGCCCCTGC
CCTCAATAGCACACAACCCACATATCAGCTTTCTGAAGAGAAGGAACCTACTGTTTAGTGCTCCTCACTTTGCAATGTTTGTG
CTACGCCAGAATTTCTCCAGTTTTTTTCATTATCATCCCCCTGAGAAAAAAATTACATTGAATTTAAATTTTCCCTAATAAGA
GAAATTAAATATGAAAGAATAGGATTTTGTTGGGTAAGATTGAGCTTTGGAAGGTCACGAACCATTATTCTATCTAAGGTGTG
TGTTTTGTTTTGTTTTTTTTTGTTTTTTTTTTGCAATCCCTCTCCCCCTGAACCAATTTCACATTGGGAATGCAGGACCTAGA
CTGCTGAATAAAAAGCTACTTCTTCTATAATTGTCAGGTTCTCTCCAATTTCTCAGCTTCCTCAAAGACATGGGGTGGAGTTG
GGTGTGCCATCACTGAGAGAGCTCTGGAACTTTTGACTCTTAGTGACATTTTTAGATTTAGGGGTTCATGGCCTTCCACATGT
TGCCACCAACTGGTGATCTCTGCCCCTTCATGCTGATCAAGAAAGTAGAAACTCCTCGTCGCCTTCAGGTTTGCAGTCGCAGA
AACATTGCCTGCTGTGGACTGTCAGCACAAAACTGGGACACTGGTGTCATTTAGACTGTCAGCAGTGCACATGATTGTACGAT
AGACTCCAGGCAACCATGTGCATCTGTGCAAGATGACCTCTGCCCCAAGAGAAGGGTTACGGTCTAATTAAATGTTTACCAAG
ATGGTACCAGTGGGCTCTCCCCGTGTCCTTTGGTGTTATTGGAGCTGGTGTATGACAGACTCAAGGAAATTTTTTAAGGAAAA
TGAAGAAGAAATCAACCTTTATGGTTCTCTTTCATTGGAAGAGGAGAATAAGGAAAGAAATGGCAGGTAGAGAGGGAGGGGGA
AAGGAATAGAAATGGCATGTCTTTGATGCTGTGGCTTGTGTGGGGACAATGGGAAGAGCACAGCAGGCACAACATATCTGTGT
TAGTGCCACGTGGTATCTGTTAAGTATGGCCAGAGCCTCACATATAAGTGAAGAGAGTTAAGACAATTCTTGCTCTTTGAACA
ATAATAGTCTATAGAATTTCTATTGGCAAACCATCCCAGACAACCTGACCTATCAAACAAAAGCAAATAATCCCTGTCTCAGA
ACTGCTGGTCTAAAAGCTAGAAGGGGCATGATAATGGAAATTGCTAGAAAAGAGAGAATGCTCTACTCTCTTTCCTGTGCCTA
CCTACCCCCATCCTAAACCCTGTAAAACAGAATTTCAAAATAGATGTCAAATATGAAGTAATTCAGACTTCCAAAGAAGGAAA
GAGTTCTGCCCAGGGCAGTATGAGCAAATCCACAGGGATGTTAAGATTTGGTCCAACTCAAAGGTTTATGGGCAGTGAGCCTA
GAGTCTCTTGAGAGTAAACCCTTGCATTTGGGACAAGGAGAATATGTGAAGTTCAGGAGTGCTCACACTAGAGCAAGATCCAG
AAAAAAAAAAATCCAATGGCATTTTAAACTAGATTGCATTATCACTCAATGCTGTTACTTTGAGCAGACAAATCAGTTGAATG
GGAGGGCAAATGGCAGAAATGAACAAAAGCTATTAGGTGAAAGCATCCCCAATGTATCAGTTGTGAGATGATTTTTGTTTAAT
GATGATCAGGTTTACATTGAAGTGGCTTGGAAGACGTATTTCAGAGGGACTGGGTTTGTACTGCAAAACTCTGAACACTAGAG
CAGGTTCTACTAGCACTTGGGCAGTAAGGTAGCGGGTGTGTATTATGCTATTGCCATAGTTCTCGTCTTTGTGGATTCACATA
CCCTTTCCCATGAGGAGCTTGCTACTAACAGCCTCCTGTTTCTGTTGTTTTTATATGGGAGAAGAGAAAGAGCTTGGAATTTC
AATTGTCTAAACAATTGGTATGATTTACAAGAAGGCAAACCATTCAGGAGATGTTCAACAGTGTATCATTCTTAGCATTCAAT
ACAATGTTTATTATAAAATATACACCTGAGTTTATGTTTTTCTGCCAGGCTGAAGGGCAATAATGTCTTGCTATGCAAACACT
CTATTTTATGTGTGAATTTTTTTAACTGTAATTTTATGTGTGAATTTTTTTAACTAAACTCTATCATCATTTTCTATGTTGAC
ATCTTTTTTTTTTTTTTAATCTGTTTCCAACTCTGAGTCTGTGAACTATCTCTTCTGACTGGATGCTGGCCTAAAATCCTATT
AGTGCTTAAACAGACCTCAAAACACTCTGAACCTGTAGGCCAATACAGAGATGTTGTTCTTTGATATATCTTGGGTCCTTGAT
GGCTTCAACAAACAAGGTCATAATTTGTTTAAATTCAGTGTTTTCTGTAGATACCTTCTTCTCAGTTTCATTAAGAAGAGTAA
CCATCTTTGGTTTTCCAAAGAATGGAAACTCCTACCCTAGACTTTAGACTTAGAGCGTCTGCCTTTCACGATGAGTAAGAGAT
CCAGAATGTTTAGGGGATGTGCGTCAGCCCACCTGGTACAGTGGCAAAGCTGAATGCGAACTTGAGGCCTCCTGAGGCCTGAC
CTTCTATGCCCCCAGCCCTCCACCCCAAGCACCTTTTGGTGTGGCTGGAAACACATGACATTGGATGTGATTTTTCTCAAGCC
CTTCACTGTGGAAGGCATGGGAGACTGCCCAGCATTGGGCATGTGGCTGTTAACGTTTCCATTTCAAGTCCCTGATTCTTACT
GGAGAAGTTAAGGAGCCACTTAATGTTTTCACAGACCTCTGATTCTGTTGTGAATGTGGCATTCCAGTGAGTACAACCTGCTT
GCTATAAAGAAAGCAGCATATTTTGACAATTTTATTTCTTCCTTGGGTACTTACATTTTTATTACAAAAATGGCCGTTATAAA
AAAAGACAGAAGGGCTGGGCAGTGGCTTGCTCCCTAGAAACTGAGATTCCGAAGCAGGTGTTTCCTCTCCCCTAGACTCAGAG
GTACATTTAATCCATCTTCTCCATTTCCTCCTTCAGGACCAGCTATGAGATTCAGTGCATTTCTAGCCCAGCGGATGTTCATT
CTCCACTAAACTTCATCTTTTACTAAGCAAAGGGGGATTATTCCATGAGGCAGCCAGGAGCAAGGGGCCATGATATTCATGAC
TTTGTCTGCTGGGCATTTTTCAAAGTGTCCTTGAATTCACTCAGCAAACAAAGCTTTCTGGAGAATCTCTCAAAACTTAGGCC
CTGCTCCATTTGGCCAAAAATGATGGCTGCTCCAAAACTCTGAACTTCTTAAAACTCCATCTGCTACATTATTTCTGGAGTTT
AAACATGACTTTTTCTGTCTTTGAGTATAGATGTGTTTGTTTAATTAACGAAGCACAAGTCTGTTAAGCAGAAGGCTCCAAGC
TGTATTCTATACTTGGGAATCCTTGGTGCCATCTTTATTCTACCAAGTGCCAATCACCATGGCTAAAGTGGGCGTATATTACA
GCCTGTGTCCTAAGCTTAGAAGCTTTAATGTACTTTTTTAAATGAAAAGTATTAGAGGGGGTTGAACATTGTAACTAAAGCAT
AAAGTTAGACCAATTACATGCAGAGATGTTTATTTAATATTGTGTGAGCTGAGTCCTTCTGTATAAATTATTTGCACACTTTT
CTTGCATGATGAACTGATTTTTTATAGTTGTTTGTACCAGACGGTGGCATATTTTTGTAAAAAACTTTTGACACTGAATTGCA
ATAAATGTTTTTCCAACAACA.

[0479] In some embodiments, oligonucleotides may have a region of complementarity to a mouse FBXO32 sequence, for example, as provided below (Gene ID: 67731; NCBI Ref. No: NM_026346.3)

(SEQ ID NO: 506)
GACGGGGCAGCGGCCCGGGATAAATACTGCGCTCGGGCAGCCGCTCAGCATTCCCAGAGTCAGGAGGCGACCTTCCCCAA
CGCCTGCGCCCCTGTGAGTGCAAGGATCCCCGCGCCCACCCAGGATCCGCAGCCCTCCACACTAGTTGACCCACTCTTGT
CCCGGTCGCCGCCTGCGTCGTTCCCCAGCATCTTCCCAACGCGCCGCATACCCTGGGCAAGCCAGGCCGGTTCCTGGCTG
TCAATCCGTCCCGTCCGTCGGTCGCGTCCGCGCTCTGTACCATGCCGTTCCTTGGGCAGGACTGGCGGTCCCCGGGCCAG
AGCTGGGTGAAGACGGCGGACGGCTGGAAGCGCTTCTTGGATGAGAAAAGCGGCAGCTTCGTGAGCGACCTCAGCAGTTA
CTGCAACAAGGAGGTATACAGTAAGGAGAATCTGTTCAGCAGCCTGAACTACGACGTCGCAGCCAAGAAGAGAAAGAAAG
ACATTCAGAACAGCAAAACCAAAACTCAGTACTTCCATCAAGAAAAGTGGATCTATGTTCACAAAGGAAGTACGAAGGAG
CGCCATGGATACTGTACTTTGGGGGAAGCTTTCAACAGACTGGACTTCTCGACTGCCATCCTGGATTCCAGAAGATTCAA
CTACGTAGTAAGGCTGTTGGAGCTGATAGCAAAGTCACAGCTCACATCCCTGAGTGGCATCGCCCAAAAGAACTTCATGA
ACATTTTGGAAAAAGTGGTACTGAAAGTTCTTGAAGACCAGCAAAACATAAGACTTATACGGGAACTTCTCCAGACTCTC
TACACATCCTTATGCACACTGGTGCAGAGAGTCGGCAAGTCTGTGCTGGTGGGCAACATTAACATGTGGGTGTATCGGAT
GGAGACCATTCTACACTGGCAGCAGCAGCTGAATAGCATCCAGATCAGCAGGCCTGCCTTCAAAGGCCTCACGATCACCG
ACCTGCCTGTGTGCTTACAACTGAACATCATGCAGAGGCTGAGTGACGGGCGGGACCTGGTCAGCCTGGGCCAGGCAGCC
CCAGACCTGCATGTGCTCAGTGAGGACCGGCTACTGTGGAAGAGACTCTGCCAGTACCACTTCTCAGAGAGGCAGATTCG
CAAGCGTTTGATCTTGTCTGACAAAGGGCAGCTGGATTGGAAGAAGATGTATTTTAAGCTTGTACGATGTTACCCAAGAA
GAGAGCAGTATGGGGTCACCCTGCAGCTTTGCAAACACTGCCACATTCTCTCCTGGAAGGGCACTGACCATCCGTGCACG
GCCAACAACCCAGAGAGCTGCTCCGTCTCACTTTCCCCTCAAGACTTTATCAATTTGTTCAAGTTCTGAATAATCCCAGC
ACACGACAACACTTCAGAAGGCTTCTAATTGGATGGCTGGGAGTCGGGACACTTCATTTGTAAATAGTGTACATTTTAAG
CATTGGCTTGAAACTGCGGGGGATACGTCATTGAGGAGACGTTGGCGGGGAAGAGATGCAGTTGCCGATGGAAATTTACA
AATGTGAATTCCACATGAGAACTGGTACAGAAAAGCAGAAATACTGTAAATAGACTTTTTATTTTCCCTAACGATTTGCA
AGCAAGACTATAAAGGCAAGAACTCTATGTCAGCCATGGAAACGGAGTCCTCTTGAGTTCCCTAGGAAGAAAAAGGCAAA
AAGCTCAAAAACAAGATGGAACACTCTGTTTACAATGTGAAAATGTTGTTAAGACAAAAATAAGGAAGAAGGAAGATGAA
CGCTGTCATTGAGAAACCCTTGGGCTTTGGGTTTGGATTCGGGGTTTGTTTTCAGCAGGCCAAGAAGTATATCCACCTGA
AATCTGCACGGGCTTAAGTCCTTATCCTATGAAGATGCCACACAATGGTCTACCTCTAAAAGCATAGCGTGTTCTCTGGC
AACATACTTTATCTGGGAGGCAATGTCTGTGTTTCATGTAAGTTCTATACTCTGTGAAGTGATCTAAGATGGGAAGGCTG
TTAGGAAAAAAAAAAAAAGCCCTCTCTTGGTTCTGACTTCCTGTCCCCCCAGTCCCTCTCAGTCCCTGCACCTCTTCTCC
TTTCATGTTGTCACTCCTGTAGGGAACCGGGAGGCCAGCTAAAGAACAGCAGAAGTCATGAAGAGAGAATTAGGCACCTG
TGCATGCTCAGAACTTTCCATTTAACTCTTCCTTCTTCTAGCCTGACTTCTAGGCTTGTCCGGGCTTCCTTGAGTGTCTT
CATGGATAAGTGGATGTCTGGGACCTTAGGAGAGCCCAAGAACTGAGGCTTGAGAGACACAGTTTCTCACACTAGCCAGT
TAAACATTCTGCCAGCTGCTGTTTCCCCTCGGCAGGCCAATGAGCTGAGGCACTGTCTGTTCTGTAGGCCCAGCATCCAA
CTCAAGTCACCCTGAACCGGGACTTTTTCACAAGCATGATTTCAAAGAAAGCCTGATAGATGTGTTCGTCTTAAACTTGT
TTCAGGACTGAGTTAGAGCAAAGATAAAGAGTCCCGGGGGTTCTTGTGAGACAGAGACATGAACACTGTGGAAGAAAGGA
GAAGGAGATCTCAGGGCTTAAGGAGTTAATTCCTGGGGTGGGGGAAATGTTTTTATATTTTACTTTTTACAGATTGTTGC
TTTTCTACAATGTACATATATTTGCAATTGTATTTGCTGTTTTTTTTTTAAATCTCCAAATAAAATTGCCACTATGCATG
CTCTTGGCAAACAAGCAGAAATAGGAATTTGTTCCATGTAAATGTTAAGGTGTGGTGTGACCTGAAGCATTGATGCGTGG
GGTAGTCCTAGGAGGAGAGGAAAGATGGCTGAGCGTGAACAAGAACAAGGCCGGGGCAGTGAACACTTCTTCCTTCAGTC
GTAGAGCACCCTCGGGTTGGTACTGTACAGGCGGATGGAGTCTGTGGGGCTCCCTGATTTGCAGGGTCTTACATCTGTGC
TTACACCAGAAGTTCTCCATGTTTTCTTTATCAGCACCATCTCCTGGTGGCCAAATTAAGTTGAATTTAAAGGTTCGTAA
TGAGAAAAGGGATGTGTAAAAGAACAAGATTTCTTTTACATGGAAAAGTTAAAAGTCTAAAGCTGAACCTTGGAGATTAC
AAACATTGTAACAGAGAAGAGTTTCCTGTTTGCTTTGGGATTTTTGAAATCTTCTCCCCAGAAACAATTTTACATTAAGA
ATGTAGGGCCTTGGGGCTGGAGAGGTGGCTCAGCAGTTAAGAGCACTGACTGCTCTTCTGAAGGTCCTGAGTTCAATTCC
TAGCAACCACATGGTGGCTCATAACCATCCATAATGAGATCTGATGGCCTCTTCTGGTGAGTCTGAAGACAGCTACAGTG
TACTTACATATAATAAATAAATAAATAAATAAATAAATAAATAAATAAATAAATAAATAAATCTATCTTTAAAAGAAAAA
GAATGTAGGACCTAGGTGGAAGGAAGGAAGGAAGGAAGGAAGGAAGCAAGGAAGGAAGGAAAGCAGGCAGGCCTGCCGCC
ACAGTGATTCTGAGTGACAGTGTTGAGGTTAGGGGATCGTGGCCTTTCACATGTCCTCAGCCTGCTCTGTGGTGCTTTTC
AGAGATGGGAACTTGTAGGGACCTTGGGGTTTACAGGTCCGTCAACTTTGCCAGCTTTGAACTGCCAGCGCAAAACTAGT
TAGCCAGTCTTACAGATAGGCAGCAGTACCCAAAGTCATATAGCATCCATACACCCCAGGCAACAATGTAAAATGGCCCT
TACCCCAAGCAGCAAGGGCACAGCTTCTTGAAATATTTAGTAGGTGCTTGCAGGTTCTCCATGACCCTTGGTGTCATTGG
ATATGGTATGTGACACAACCGAAGAATCGTTTGACGGATGAAGAAGAGGAAAGGAGCATGTATTGGTCGCTGTCACTGGC
TGGTAGAAAACAGGAAGGATGTGGAAGGTGGAGAGGGAGTGGGAGAGGTGTAGAAATGATGTATCTTTGATGCTGTTTAG
GGTGGGAGCAACAGAGAGAGGAGGGCAAGCAAGATACCCATATTAGGTCATGGCCAGAGCCTCATATTCAAGTACTGGGA
GTTAAAAAGAAAAGCTCTTAGGACATTAATAGTCTATAGAATTCTTGGCAAACCCATGCAGGACTCCCAGACTTAAAACA
CAAAACCTAAGAATTCCTGACCCAGAACTGCTAGTACAAAAGCAAGAGGGGTGTGGCTATAGAAGTTGCTGAGAGAATTG
GGACTGTGTATCTCTCTACTGGACCTGACTCCCCTCCTTTGCATGTTGAAATGCAGAACTAGAGTTATACCCACTTTGAA
GTGATTCAGAATCCAGAGAAGGAAAAGAGTTCTGTCCAAGCAAACCAAGGGAGATGGTCACTGGTGACTTTACTTTGGAG
CAATCAGCTGAGAGTCTCTGAATGAGAACCATCGTGTGTGTGTGTGTGTGTGTGTGTGTGTGTGTGTGTGATACAACTGA
AGTTTAGGAATGCTCCTTTTATAGCCAGAATCAGTAAAAGAAAATCTCACTGTCACTGTCAGCTAGACCATGTCGCTACT
ACTACCATTGCTTCAAGTGGGTATCTCAGTTGAACGGGAGGGAAAAGGTGACAGACAGAAAGGAACAGACATTACACAGT
GGGCTCTCCAGCCCACCAGCTGAGAGGGGCTTTCTGGTTAGTGATGATCAACTTCAGGTGGCACTGGTTTAGAGGAGACA
TTTTTAAGGGACAAAGTTTCCACCACAAAAGCTTTCAACGGAAGAGCCGATCTAATTGTGACCATGAAGCCAGCTGATGG
GTGACCACACAAACCCTTCCCCGGGAGGCATTTGCTGTTGACACAGGCTCCTTATTTCTGCCGCTTCATACGGGAGAAAA
AAAAAGAGTGGGACTTTGATTTGTCTAAGCAGTTGGTATGATTCACAGAGAGATAAATCATCACAGGAGATGGTTAGCAG
TGTATGGTTCTCGGCTTCAACGCATTGTTTATTATAAAACATGCACCTGGGTTTATATTTTTCTGCCTGGTTATAAAGCA
ATAACATCTTGCTATGCAAACACTAAATTTCATGTGTGAATTTTCAACTGTGATTTTATGTGTGCATTTTTTAAACTAAA
CTCTATCATTTTTCTATGTTGACATCTGTTGTTGGTTTGGTTTTGTTTTGTTTTTAATCTGTTTCCAACTATCTGAGTCT
GTGAACCATCTCTCCTGACTGGATGCTGGCTTGAAACCTGTTAGTGCTTAAACAGACTCAGAAACAACCCTGGACCTCTG
GGGCAAACGCAGGGGTGTTACTCTTTGATATATCATGGGCCCTCTGTGGCTTCAACAAACAAAGTCATAATTCCTCTAAA
TTCTGTGTTTTCTGTAAATATTTTCTTCTTCTCAGCTCTGCTAAAATGGGGGTGGGGGGGGGGGGGGAGAGAGAGAAACT
CCTATCCCAGACTTTAGACCAAAAGGGGTTGTTAGAGAGTATGGACTCTGGCATTTCTGCATTTGAAGATGAGGAAGCCT
TTCCAGAATTGGGGGTACAGAGGCTTTCTCTGTGCTTCCTGGGAGGTCAGCAAGAGGGTTGAACAGAAACCTGAAGCTTC
CTGATGCCAGAGCTCTTGAGCCCACCTCTCCCCCAGCACCTTGTGGACGTGTGTAAATTCATGACACCCACTGTAATGCC
TCCCAAGATCTTCACTGTGGGAGGCATGGGAGGTGATCCCATGATGGGCTCCTGCCACAAAATCTTCCAAACCTTTTAAG
TCTGATTCCTGCTGGAGAAGTTAGAGTCCCTCTTTCATTTTCATACCCTCTTACTCTGCTGTGAGTGCCACATTCAGCTG
AGCACCACCTGCTTCCTAAGACGTAACCAGTGTGCTGGGGAGATGGCTCAGTTGATAAAGTGCCTGCAGTGTAAGTGTGA
GGACCTGAATTCAGGTTCCAGCATCTGTGTAAGAGCCAGGCAGGAACTTAAGTGCAAGGCGGGGCAGGGGTGGGGATAGG
TTCATTGACCAACCAGTCTTAAGAATGAAGTGGTACCCAGGCTCATTGAGAGATCCTGTCTCAAAAAATAAAAATGGACA
GAGATCTAGGGATGCACCCAACATCTGCCGCAACCTCCCAAGTCATATGCGTGTGCACAGAAATCCCCAGATCTTTCTTC
TCCCCTGAAATGCAAAGGTACATTTAAACTATCCATCCTCTTTCTTGCCCGTCTTTTGGCAGTGAGCCCTGCCATAACAT
AAGATCCAGTGAGGAGCAGTTCAGCCAGGTTGGACAGTGATCCATTCTGTTCATCCTTGTTTGTAATAAGCAGAATTTAT
CCTGTAAGGCAAGGGGTGGTGATAGCCATAATTTTTGTCGGCTGGGCTTTTTTCAAAGTGTCCTTGAATTCAGCAAGCAA
ACCTTCTTTGAGAAAGCTCTCTAAACTTAGTCTCTCTCCATTTGGCTGGAAATAATGGATGGCCACATCCAAACTCCAAA
TTTCTGGATGTGTCATATGCCTCAGCACTACAGAATCTGACTCTCTCTTTGAGTATAGACATGCGTGTTAACTATGCACA
GGGCTGTTTAACAGATGGCTCCAATCCCTGCTCCATACTTGGGAGCCTTTGGTTCCATCTTTATACCAAATGCCAATCAC
ACTGGCTACAGAGAGTGTATTATAGTCTGTGTCTAAGCTTAGAAGCTTTAAATGTATGTTTTAAAGAAAAAATACTAGAG
TGGGTTGAACACTTTAACTAAACTTGGAAGGTTGGACAGATTATGTGCAAAGATGATTGTTTGTTTAATAATGAATAATC
TGAATCCTGTATAACTTATTTGCACACCTTTCTTGCATGATGAACTGACATTTTTATAGTTGTTTGTATAAGACAGTGGC
ATATTTTTGTAAACATTTTTTTGACACTGAACTTCAATAAATGTTTTTCCTACAACACA.

[0480] In some embodiments, an oligonucleotide comprises a region of complementarity to a FBXO32 sequence as set forth in SEQ ID NO: 505 or SEQ ID NO: 506. In some embodiments, the oligonucleotide comprises a region of complementarity that is at least 80%, 85%, 90%, 95%, 96%, 97%, 98%, 99%, or 100% complementary to a FBXO32 sequence as set forth in SEQ ID NO: 505 or SEQ ID NO: 506. In some embodiments, the oligonucleotide comprises a sequence that has at least 10, 11, 12, 13, 14, 15, 16, 17, 18, or 19 consecutive nucleotides that are perfectly complementary to a FBXO32 sequence as set forth in SEQ ID NO: 505 or SEQ ID NO: 506. In some embodiments, an oligonucleotide may comprise a sequence that targets (e.g., is complementary to) an RNA version (i.e., wherein the T's are replaced with U's) of a FBXO32 sequence as set forth in SEQ ID NO: 505 or SEQ ID NO: 506. In some embodiments, the oligonucleotide comprises a sequence that is complementary (e.g., at least 80%, 85%, 90%, 95%, 96%, 97%, 98%, 99%, or 100% complementary) to an RNA version of a FBXO32 sequence as set forth in SEQ ID NO: 505 or SEQ ID NO: 506. In some embodiments, the oligonucleotide comprises a sequence that has at least 10, 11, 12, 13, 14, 15, 16, 17, 18, or 19 consecutive nucleotides that are perfectly complementary to an RNA version of a FBXO32 sequence as set forth in SEQ ID NO: 505 or SEQ ID NO: 506.

[0481] In some embodiments, a FBXO32-targeting oligonucleotide comprises an antisense strand that comprises at least 10, 11, 12, 13, 14, 15, 16, 17, 18, or 19 consecutive nucleotides of a sequence comprising any one of SEQ ID NOs: 555-578. In some embodiments, a FBXO32-targeting oligonucleotide comprises an antisense strand that comprises any one of SEQ ID NO: 555-578. In some embodiments, an oligonucleotide comprises an antisense strand that comprises shares at least 70%, 75%, 80%, 85%, 90%, 95%, or 97% sequence identity with at least 12 or at least 15 consecutive nucleotides of any one of SEQ ID NOs: 555-578.

[0482] In some embodiments, a FBXO32-targeting oligonucleotide comprises an antisense strand that targets a FBXO32 sequence comprising any one of SEQ ID NO: 507-554. In some embodiments, an oligonucleotide comprises an antisense strand comprising at least 10, 11, 12, 13, 14, 15, 16, 17, 18, or 19 nucleotides (e.g., consecutive nucleotides) that are complementary to a FBXO32 sequence comprising any one of SEQ ID NO: 507-554. In some embodiments, a FBXO32-targeting oligonucleotide comprises an antisense strand comprising a sequence that is at least 70%, 75%, 80%, 85%, 90%, 95%, or 97% complementary with at least 12 or at least 15 consecutive nucleotides of any one of SEQ ID NO: 507-554.

[0483] In some embodiments, a FBXO32-targeting oligonucleotide comprises an antisense strand comprises a region of complementarity to a target sequence as set forth in any one of SEQ ID NOs: 507-554. In some embodiments, the region of complementarity is at least 8, at least 9, at least 10, at least 11, at least 12, at least 13, at least 14, at least 15, at least 16, at least 17, or at least 19 nucleotides in length. In some embodiments, the region of complementarity is 8, 9, 10, 11, 12, 13, 14, 15, 16, 17, 18, or 19 nucleotides in length. In some embodiments, the region of complementarity is in the range of 8 to 20, 10 to 20 or 15 to 20 nucleotides in length. In some embodiments, the region of complementarity is fully complementary with all or a portion of its target sequence. In some embodiments, the region of complementarity includes 1, 2, 3 or more mismatches.

[0484] In some embodiments, a FBXO32-targeting oligonucleotide further comprises a sense strand that hybridizes to the antisense strand to form a double stranded siRNA. In some embodiments, the FBXO32-targeting oligonucleotide comprises an antisense strand that comprises the nucleotide sequence of any one of SEQ ID NOs: 555-578. In some embodiments, the FBXO32 targeting oligonucleotide further comprises a sense strand that comprises the nucleotide sequence of any one of SEQ ID NOs: 531-554.

[0485] In some embodiments, the FBXO32-targeing oligonucleotide is a double stranded oligonucleotide (e.g., an siRNA) comprising an antisense strand that comprises the nucleotide sequence of any one of SEQ ID NOs: 555-578 and a sense strand that hybridizes to the antisense strand and comprises the nucleotide sequence of any one of SEQ ID NOs: 531-554, wherein the antisense strand and/or (e.g., and) comprises one or more modified nucleosides (e.g., 2′-modified nucleosides). In some embodiment, the one or more modified nucleosides are selected from 2′-O-Me and 2′-F modified nucleosides.

[0486] In some embodiments, the FBXO32-targeing oligonucleotide is a double stranded oligonucleotide (e.g., an siRNA) comprising an antisense strand that comprises the nucleotide sequence of any one of SEQ ID NOs: 555-578 and a sense strand that hybridizes to the antisense strand and comprises the nucleotide sequence of any one of SEQ ID NOs: 531-554, wherein the each nucleoside in the antisense strand and/or (e.g., and) each nucleoside in the sense strand is a 2′-modified nucleoside selected from 2′-O-Me and 2′-F modified nucleosides.

[0487] In some embodiments, the FBXO32-targeing oligonucleotide is a double stranded oligonucleotide (e.g., an siRNA) comprising an antisense strand that comprises the nucleotide sequence of any one of SEQ ID NOs: 555-578 and a sense strand that hybridizes to the antisense strand and comprises the nucleotide sequence of any one of SEQ ID NOs: 531-554, wherein the each nucleoside in the antisense strand and each nucleoside in the sense strand is a 2′-modified nucleoside selected from 2′-O-Me and 2′-F modified nucleosides, and wherein the antisense strand and/or (e.g., and) the sense strand each comprises one or more phosphorothioate internucleoside linkages. In some embodiments, the sense strand does not comprise any phosphorothioate internucleoside linkages (all the internucleoside linkages in the sense strand are phosphodiester internucleoside linkages), and the antisense strand comprises 1, 2, or 3 phosphorothioate internucleoside linkages. In some embodiments, the antisense strand comprises 2 phosphorothioate internucleoside linkages, optionally wherein the two internucleoside linkages at the 3′ end of the antisense strand are phosphorothioate internucleoside linkages and the rest of the internucleoside linkages in the antisense strand are phosphodiester internucleoside linkages,

[0488] In some embodiments, the antisense strand of the FBXO32-targeing oligonucleotide comprises a structure of (5′ to 3′): fNfNmNfNmNfNmNfNmNfNmNfNmNfNmNfNmNfNmNfNmN*fN*mN, wherein “mN” indicates 2′-O-methyl (2′-O-Me) modified nucleosides; “fN” indicates 2′-fluoro (2′-F) modified nucleosides; “*” indicates phosphrothioate internucleoside linkage; and the absence of “*” between two nucleosides indicate phosphodiester internucleoside linkage.

[0489] In some embodiments, the sense strand of the FBXO32-targeing oligonucleotide comprises a structure of (5′ to 3′): mNmNfNmNfNmNfNmNfNmNfNmNfNmNfNmNfNmNfNmNfN, wherein “mN” indicates 2′-O-methyl (2′-O-Me) modified nucleosides; “fN” indicates 2′-fluoro (2′-F) modified nucleosides; and the absence of “*” between two nucleosides indicate phosphodiester internucleoside linkage.

[0490] In some embodiments, the antisense strand of the FBXO32-targeing oligonucleotide is selected from the modified version of SEQ ID NOs: 555-578 listed in Table 22. In some embodiments, the sense strand of the FBXO32-targeing oligonucleotide is selected from the modified version of SEQ ID NOs: 531-554 listed in Table 22. In some embodiments, the FBXO32-targeing oligonucleotide is a siRNA selected from the siRNAs listed in Table 22.

TABLE 20
FBXO32 Target Sequences

| | Corresponding | | |
|---|---|---|---|
| Reference | nucleotides of the | FBXO32 Target Sequence | |
| Sequence | Reference Sequence | (5′ to 3′) | SEQ ID NO: |
| NM_058229.4 | 1063-1081 | CTGGATTGGAAGAAGATGT | 507 |
| (SEQ ID NO: 297) | | | |
| NM_058229.4 | 1055-1073 | AAGGGCAGCTGGATTGGAA | 508 |
| (SEQ ID NO: 297) | | | |
| NM_058229.4 | 1064-1082 | TGGATTGGAAGAAGATGTA | 509 |
| (SEQ ID NO: 297) | | | |
| NM_058229.4 | 1056-1074 | AGGGCAGCTGGATTGGAAG | 510 |
| (SEQ ID NO: 297) | | | |
| NM_058229.4 | 1052-1070 | ACAAAGGGCAGCTGGATTG | 511 |
| (SEQ ID NO: 297) | | | |
| NM_058229.4 | 5127-5145 | TCATCATTTTCTATGTTGA | 512 |
| (SEQ ID NO: 297) | | | |
| NM_058229.4 | 2295-2313 | TGGATATCTTCATGGATAA | 513 |
| (SEQ ID NO: 297) | | | |
| NM_058229.4 | 5217-5235 | CTAAAATCCTATTAGTGCT | 514 |
| (SEQ ID NO: 297) | | | |
| NM_058229.4 | 842-860 | GGCCTGCCTTCAAAGGCCT | 515 |
| (SEQ ID NO: 297) | | | |
| NM_058229.4 | 1516-1534 | GCAAGACTATAAGGGCAAT | 516 |
| (SEQ ID NO: 297) | | | |
| NM_058229.4297) | 1022-1040 | GGCAGATCCGCAAACGATT | 517 |
| (SEQ ID NO: | | | |
| NM_058229.4 | 1448-1466 | ACTTCTCACTAGAATTGGT | 518 |
| (SEQ ID NO: 297) | | | |
| NM_058229.4 | 2756-2774 | TACATATATTTGCAGTTGT | 519 |
| (SEQ ID NO: 297) | | | |
| NM_058229.4 | 5299-5317 | CTTGGGTCCTTGATGGCTT | 520 |
| (SEQ ID NO: 297) | | | |
| NM_058229.4 | 4887-4905 | CTTGGAATTTCAATTGTCT | 521 |
| (SEQ ID NO: 297) | | | |
| NM_026346.3 | 742-760 | TGAAAGTTCTTGAAGACCA | 522 |
| (SEQ ID NO: 298) | | | |
| NM_026346.3 | 966-984 | CCTGTGTGCTTACAACTGA | 523 |
| (SEQ ID NO: 298) | | | |
| NM_026346.3 | 655-673 | TGTTGGAGCTGATAGCAAA | 524 |
| (SEQ ID NO: 298) | | | |
| NM_026346.3 | 621-639 | CTGGATTCCAGAAGATTCA | 525 |
| (SEQ ID NO: 298) | | | |
| NM_026346.3 | 628-646 | CCAGAAGATTCAACTACGT | 526 |
| (SEQ ID NO: 298) | | | |
| NM_026346.3 | 697-715 | GCATCGCCCAAAAGAACTT | 527 |
| (SEQ ID NO: 298) | | | |
| NM_026346.3 | 620-638 | CCTGGATTCCAGAAGATTC | 528 |
| (SEQ ID NO: 298) | | | |
| NM_026346.3 | 740-758 | ACTGAAAGTTCTTGAAGAC | 529 |
| (SEQ ID NO: 298) | | | |
| NM_026346.3 | 1080-1098 | AAGAGACTCTGCCAGTACC | 530 |
| (SEQ ID NO: 298) | | | |

*The target sequences contain Ts, but binding to RNA and/or DNA is contemplated.

[0491] In some embodiments, an oligonucleotide may comprise or consist of any sequence as provided in Table 21.

TABLE 21
Oligonucleotide sequences for targeting FBXO32

| Passenger Strand/ | | Guide Strand/ | |
|---|---|---|---|
| Sense Strand | SEQ ID | Antisense Strand | SEQ ID |
| (RNA) (5’ to 3’) | NO: | (RNA) (5’ to 3’) | NO: |
| AGCUGGAUUGGAAGAAGAUGU | 531 | ACAUCUUCUUCCAAUCCAGCUGC | 555 |
| CAAAGGGCAGCUGGAUUGGAA | 532 | UUCCAAUCCAGCUGCCCUUUGUC | 556 |
| GCUGGAUUGGAAGAAGAUGUA | 533 | UACAUCUUCUUCCAAUCCAGCUG | 557 |
| AAAGGGCAGCUGGAUUGGAAG | 534 | CUUCCAAUCCAGCUGCCCUUUGU | 558 |
| AGACAAAGGGCAGCUGGAUUG | 535 | CAAUCCAGCUGCCCUUUGUCUGA | 559 |
| UAUCAUCAUUUUCUAUGUUGA | 536 | UCAACAUAGAAAAUGAUGAUAGA | 560 |
| CUUGGAUAUCUUCAUGGAUAA | 537 | UUAUCCAUGAAGAUAUCCAAGGA | 561 |
| GCCUAAAAUCCUAUUAGUGCU | 538 | AGCACUAAUAGGAUUUUAGGCCA | 562 |
| CAGGCCUGCCUUCAAAGGCCU | 539 | AGGCCUUUGAAGGCAGGCCUGGU | 563 |
| CAGCAAGACUAUAAGGGCAAU | 540 | AUUGCCCUUAUAGUCUUGCUGGC | 564 |
| GCGGCAGAUCCGCAAACGAUU | 541 | AAUCGUUUGCGGAUCUGCCGCUC | 565 |
| GAACUUCUCACUAGAAUUGGU | 542 | ACCAAUUCUAGUGAGAAGUUCAC | 566 |
| UGUACAUAUAUUUGCAGUUGU | 543 | ACAACUGCAAAUAUAUGUACAUU | 567 |
| AUCUUGGGUCCUUGAUGGCUU | 544 | AAGCCAUCAAGGACCCAAGAUAU | 568 |
| AGCUUGGAAUUUCAAUUGUCU | 545 | AGACAAUUGAAAUUCCAAGCUCU | 569 |
| ACUGAAAGUUCUUGAAGACCA | 546 | UGGUCUUCAAGAACUUUCAGUAC | 570 |
| UGCCUGUGUGCUUACAACUGA | 547 | UCAGUUGUAAGCACACAGGCAGG | 571 |
| GCUGUUGGAGCUGAUAGCAAA | 548 | UUUGCUAUCAGCUCCAACAGCCU | 572 |
| UCCUGGAUUCCAGAAGAUUCA | 549 | UGAAUCUUCUGGAAUCCAGGAUG | 573 |
| UUCCAGAAGAUUCAACUACGU | 550 | ACGUAGUUGAAUCUUCUGGAAUC | 574 |
| UGGCAUCGCCCAAAAGAACUU | 551 | AAGUUCUUUUGGGCGAUGCCACU | 575 |
| AUCCUGGAUUCCAGAAGAUUC | 552 | GAAUCUUCUGGAAUCCAGGAUGG | 576 |
| GUACUGAAAGUUCUUGAAGAC | 553 | GUCUUCAAGAACUUUCAGUACCA | 577 |
| GGAAGAGACUCUGCCAGUACC | 554 | GGUACUGGCAGAGUCUCUUCCAC | 578 |

[0492] In some embodiments, an oligonucleotide is a modified oligonucleotide as provided in Table 22, wherein ‘mN’ represents a 2′-O-methyl modified nucleoside (e.g., mU is 2′-O-methyl modified uridine), ‘fN’ represents a 2′-fluoro modified nucleoside (e.g., fU is 2′-fluoro modified uridine), ‘*’ represents a phosphorothioate internucleoside linkage, and lack of “*” between nucleosides indicate phosphodiester internucleoside linkage.

TABLE 22
Modified Oligonucleotides for targeting FBXO32

| | Modified Passenger | | Modified Guide | SEQ |
|---|---|---|---|---|
| | Strand/Sense Strand | SEQ ID | Strand/Antisense Strand | ID |
| siRNA # | (RNA) (5’ to 3’) | NO: | (RNA) (5’ to 3’) | NO: |
| hsFBXO32-1 | mAmGfCmUfGmGfAmUfUmG | 531 | fAfCmAfUmCfUmUfCmUfUmC | 555 |
| | fGmAfAmGfAmAfGmAfUmGf | | fCmAfAmUfCmCfAmGfCmU*f | |
| | U | | G*mC | |
| hsFBXO32-2 | mCmAfAmAfGmGfGmCfAmG | 532 | fUfUmCfCmAfAmUfCmCfAmG | 556 |
| | fCmUfGmGfAmUfUmGfGmAf | | fCmUfGmCfCmCfUmUfUmG*f | |
| | A | | U*mC | |
| hsFBXO32-3 | mGmCfUmGfGmAfUmUfGmG | 533 | fUfAmCfAmUfCmUfUmCfUmU | 557 |
| | fAmAfGmAfAmGfAmUfGmUf | | fCmCfAmAfUmCfCmAfGmC*f | |
| | A | | U*mG | |
| hsFBXO32-4 | mAmAfAmGfGmGfCmAfGmC | 534 | fCfUmUfCmCfAmAfUmCfCmA | 558 |
| | fUmGfGmAfUmUfGmGfAmAf | | fGmCfUmGfCmCfCmUfUmU*f | |
| | G | | G*mU | |
| hsFBXO32-5 | mAmGfAmCfAmAfAmGfGmG | 535 | fCfAmAfUmCfCmAfGmCfUmG | 559 |
| | fCmAfGmCfUmGfGmAfUmUf | | fCmCfCmUfUmUfGmUfCmU*f | |
| | G | | G*mA | |
| hsFBXO32-6 | mUmAfUmCfAmUfCmAfUmU | 536 | fUfCmAfAmCfAmUfAmGfAmA | 560 |
| | fUmUfCmUfAmUfGmUfUmGf | | fAmAfUmGfAmUfGmAfUmA*f | |
| | A | | G*mA | |
| hsFBXO32-7 | mCmUfUmGfGmAfUmAfUmC | 537 | fUfUmAfUmCfCmAfUmGfAmA | 561 |
| | fUmUfCmAfUmGfGmAfUmAf | | fGmAfUmAfUmCfCmAfAmG*f | |
| | A | | G*mA | |
| hsFBXO32-8 | mGmCfCmUfAmAfAmAfUmC | 538 | fAfGmCfAmCfUmAfAmUfAmG | 562 |
| | fCmUfAmUfUmAfGmUfGmCf | | fGmAfUmUfUmUfAmGfGmC*f | |
| | U | | C*mA | |
| hsFBXO32-9 | mCmAfGmGfCmCfUmGfCmCf | 539 | fAfGmGfCmCfUmUfUmGfAmA | 563 |
| | UmUfCmAfAmAfGmGfCmCf | | fGmGfCmAfGmGfCmCfUmG*f | |
| | U | | G*mU | |
| hsFBXO32- | mCmAfGmCfAmAfGmAfCmU | 540 | fAfUmUfGmCfCmCfUmUfAmU | 564 |
| 10 | fAmUfAmAfGmGfGmCfAmAf | | fAmGfUmCfUmUfGmCfUmG*f | |
| | U | | G*mC | |
| hsFBXO32- | mGmCfGmGfCmAfGmAfUmC | 541 | fAfAmUfCmGfUmUfUmGfCmG | 565 |
| 11 | fCmGfCmAfAmAfCmGfAmUf | | fGmAfUmCfUmGfCmCfGmC*f | |
| | U | | U*mC | |
| hsFBXO32- | mGmAfAmCfUmUfCmUfCmA | 542 | fAfCmCfAmAfUmUfCmUfAmG | 566 |
| 12 | fCmUfAmGfAmAfUmUfGmGf | | fUmGfAmGfAmAfGmUfUmC*f | |
| | U | | A*mC | |
| hsFBXO32- | mUmGfUmAfCmAfUmAfUmA | 543 | fAfCmAfAmCfUmGfCmAfAmA | 567 |
| 13 | fUmUfUmGfCmAfGmUfUmGf | | fUmAfUmAfUmGfUmAfCmA*f | |
| | U | | U*mU | |
| hsFBXO32- | mAmUfCmUfUmGfGmGfUmC | 544 | fAfAmGfCmCfAmUfCmAfAmG | 568 |
| 14 | fCmUfUmGfAmUfGmGfCmUf | | fGmAfCmCfCmAfAmGfAmU*f | |
| | U | | A*mU | |
| hsFBXO32- | mAmGfCmUfUmGfGmAfAmU | 545 | fAfGmAfCmAfAmUfUmGfAm | 569 |
| 15 | fUmUfCmAfAmUfUmGfUmCf | | AfAmUfUmCfCmAfAmGfCmU | |
| | U | | *fC*mU | |
| mmFBXO32- | mAmCfUmGfAmAfAmGfUmU | 546 | fUfGmGfUmCfUmUfCmAfAmG | 570 |
| 1 | fCmUfUmGfAmAfGmAfCmCf | | fAmAfCmUfUmUfCmAfGmU*f | |
| | A | | A*mC | |
| mmFBXO32- | mUmGfCmCfUmGfUmGfUmG | 547 | fUfCmAfGmUfUmGfUmAfAm | 571 |
| 2 | fCmUfUmAfCmAfAmCfUmGf | | GfCmAfCmAfCmAfGmGfCmA | |
| | A | | *fG*mG | |
| mmFBXO32- | mGmCfUmGfUmUfGmGfAmG | 548 | fUfUmUfGmCfUmAfUmCfAmG | 572 |
| 3 | fCmUfGmAfUmAfGmCfAmAf | | fCmUfCmCfAmAfCmAfGmC*f | |
| | A | | C*mU | |
| mmFBXO32- | mUmCfCmUfGmGfAmUfUmC | 549 | fUfGmAfAmUfCmUfUmCfUmG | 573 |
| 4 | fCmAfGmAfAmGfAmUfUmCf | | fGmAfAmUfCmCfAmGfGmA*f | |
| | A | | U*mG | |
| mmFBXO32- | mUmUfCmCfAmGfAmAfGmA | 550 | fAfCmGfUmAfGmUfUmGfAm | 574 |
| 5 | fUmUfCmAfAmCfUmAfCmGf | | AfUmCfUmUfCmUfGmGfAmA | |
| | U | | *fU*mC | |
| mmFBXO32- | mUmGfGmCfAmUfCmGfCmC | 551 | fAfAmGfUmUfCmUfUmUfUm | 575 |
| 6 | fCmAfAmAfAmGfAmAfCmUf | | GfGmGfCmGfAmUfGmCfCmA | |
| | U | | *fC*mU | |
| mmFBXO32- | mAmUfCmCfUmGfGmAfUmU | 552 | fGfAmAfUmCfUmUfCmUfGmG | 576 |
| 7 | fCmCfAmGfAmAfGmAfUmUf | | fAmAfUmCfCmAfGmGfAmU*f | |
| | C | | G*mG | |
| mmFBXO32- | mGmUfAmCfUmGfAmAfAmG | 553 | fGfUmCfUmUfCmAfAmGfAmA | 577 |
| 8 | fUmUfCmUfUmGfAmAfGmAf | | fCmUfUmUfCmAfGmUfAmC*f | |
| | C | | C*mA | |
| mmFBXO32- | mGmGfAmAfGmAfGmAfCmU | 554 | fGfGmUfAmCfUmGfGmCfAmG | 578 |
| 9 | fCmUfGmCfCmAfGmUfAmCf | | fAmGfUmCfUmCfUmUfCmC*f | |
| | C | | A*mC | |

[0493] g. TRIM63 Oligonucleotides

[0494] Examples of oligonucleotides useful for targeting TRIM63 are provided in Rodriguez et al., Mol Cell Endocrinol. 2015 Sep. 15; 413:36-48; Castillero et al., Metabolism. 2013 October; 62(10):1495-502; Clarke et al., Cell Metab. 2007 November; 6(5):376-85; Wada et al., J Biol Chem. 2011 Nov. 4; 286(44):38456-65; and Files et al., Am J Respir Crit Care Med. 2012 Apr. 15; 185(8):825-34, the contents of each of which are incorporated herein in their entireties. In some embodiments, the oligonucleotide is a CRISPR guide RNA targeting TRIM63. In some embodiments, the oligonucleotide is miR-23a, which has been shown to suppress TRIM63 expression.

[0495] In some embodiments, oligonucleotides may have a region of complementarity to a human TRIM63 sequence, for example, as provided below (Gene ID: 84676; NCBI Ref. No: NM_032588.3):

(SEQ ID NO: 579)
AGACAGAATTCGGGCACCAGGAGAAGGAAGCCAACAGGATCCGACCCGG
TGTTTTGTGACAAAGGCAAGACCCCCAGGTCTACTTAGAGCAAAGTTAG
TAGAGGAGGCAGCTAGGCGTGGCTCTCATTCCTTCCCACAGAATGGATT
ATAAGTCGAGCCTGATCCAGGATGGGAATCCCATGGAGAACTTGGAGAA
GCAGCTGATCTGCCCTATCTGCCTGGAGATGTTTACCAAGCCAGTGGTC
ATCTTGCCGTGCCAGCACAACCTGTGCCGGAAGTGTGCCAATGACATCT
TCCAGGCTGCAAATCCCTACTGGACCAGCCGGGGCAGCTCAGTGTCCAT
GTCTGGAGGCCGTTTCCGCTGCCCCACCTGCCGCCACGAGGTGATCATG
GATCGTCACGGAGTGTACGGCCTGCAGAGGAACCTGCTGGTGGAGAACA
TCATCGACATCTACAAACAGGAGTGCTCCAGTCGGCCGCTGCAGAAGGG
CAGTCACCCCATGTGCAAGGAGCACGAAGATGAGAAAATCAACATCTAC
TGTCTCACGTGTGAGGTGCCCACCTGCTCCATGTGCAAGGTGTTTGGGA
TCCACAAGGCCTGCGAGGTGGCCCCATTGCAGAGTGTCTTCCAGGGACA
AAAGACTGAACTGAATAACTGTATCTCCATGCTGGTGGCGGGGAATGAC
CGTGTGCAGACCATCATCACTCAGCTGGAGGATTCCCGTCGAGTGACCA
AGGAGAACAGTCACCAGGTAAAGGAAGAGCTGAGCCAGAAGTTTGACAC
GTTGTATGCCATCCTGGATGAGAAGAAAAGTGAGTTGCTGCAGCGGATC
ACGCAGGAGCAGGAGAAAAAGCTTAGCTTCATCGAGGCCCTCATCCAGC
AGTACCAGGAGCAGCTGGACAAGTCCACAAAGCTGGTGGAAACTGCCAT
CCAGTCCCTGGACGAGCCTGGGGGAGCCACCTTCCTCTTGACTGCCAAG
CAACTCATCAAAAGCATTGTGGAAGCTTCCAAGGGCTGCCAGCTGGGGA
AGACAGAGCAGGGCTTTGAGAACATGGACTTCTTTACTTTGGATTTAGA
GCACATAGCAGACGCCCTGAGAGCCATTGACTTTGGGACAGATGAGGAA
GAGGAAGAATTCATTGAAGAAGAAGATCAGGAAGAGGAAGAGTCCACAG
AAGGGAAGGAAGAAGGACACCAGTAAGGAGCTGGATGAATGAGAGGCCC
CCAGATGCAGAGAGACTGGAGAGGGTGGGGAGGGGCCCAGCGGCCTTGG
TGACAGGCCCAGGGTGGGAGGGGTCGGGGCCCCTGGAGGGGCAATGGGG
AGGTGATGTCTTCTCTCTGCTCAGAGAGCAGGGACTAGGGTAGGACCCT
CACCGCTGCGTCCAGCAGACACTGAACCAGAATTGGAAACGTGCTTGAA
ACAATCACACAGGACACTTTTCTACATTGGTGCAAAATGGAATATTTTG
TACATTTTTAAAATGTGATTTTTGTATATACTTGTATATGTATGCCAAT
TTGGTGCTTTTTGTAAAGGAACTTTTGTATAATAATGCCTGGTCGTTGG
GTGACCTGCGATTGTCAGAAAGAGGGGAAGGAAGCCAGGTTGATACAGC
TGCCCACTTCCTTTCCTGAGCAGGAGGATGGGGTAGCACTCACAGGGAC
GATGTGCTGTATTTCAGTGCCTATCCCAGACATACGGGGTGGTAACTGA
GTTTGTGTTATATGTTGTTTTAATAAATGCACAATGCTCTCTTCCTGTT
CTTCAAA.

[0496] In some embodiments, oligonucleotides may have a region of complementarity to a mouse TRIM63 sequence, for example, as provided below (Gene ID: 433766; NCBI Ref. No: NM_001039048.2)

(SEQ ID NO: 580)
AGAAGTCGGGGGTCAGGGGACGAAGACAAAGAGGATCCGAGTGGGTTTG
GAGACAAAGACTTGGTGTGACGCAGGTGGGCGAGACAGTCGCATTTCAA
AGCAATATGGATTATAAATCTAGCCTGATTCCTGATGGAAACGCTATGG
AGAACCTGGAGAAGCAGCTGATCTGCCCCATCTGCCTGGAGATGTTTAC
CAAGCCTGTGGTCATCCTGCCCTGCCAACACAACCTCTGCCGGAAGTGT
GCCAACGACATCTTCCAGGCTGCGAATCCCTACTGGACCAACCGCGGTG
GCTCAGTGTCCATGTCTGGAGGTCGTTTCCGTTGCCCCTCGTGCCGCCA
TGAAGTGATCATGGACCGGCACGGGGTGTACGGCCTGCAGAGGAACCTG
CTGGTGGAAAACATCATTGACATCTACAAGCAGGAGTGCTCCAGTCGGC
CCCTGCAGAAAGGCAGCCACCCGATGTGCAAGGAACACGAAGACGAGAA
AATCAACATCTACTGTCTCACGTGTGAGGTGCCTACTTGCTCCTTGTGC
AAGGTGTTTGGGGCTCACCAGGCCTGTGAGGTTGCCCCTTTGCAAAGCA
TCTTCCAAGGACAGAAGACTGAGCTGAGTAACTGCATCTCCATGCTGGT
GGCGGGCAACGACCGAGTGCAGACGATCATCTCTCAGCTGGAGGACTCC
TGCAGAGTGACCAAGGAGAATAGCCACCAGGTGAAGGAGGAGCTGAGTC
AGAAGTTTGACACCCTCTACGCCATCCTGGACGAGAAGAAGAGCGAGCT
GCTGCAGCGGATCACGCAGGAGCAGGAGGAGAAGCTGGGCTTCATCGAG
GCTCTGATCCTCCAGTACAGGGAGCAGCTGGAAAAGTCCACCAAACTTG
TGGAGACCGCCATCCAGTCCCTGGATGAGCCCGGAGGGGCTACCTTCCT
CTCAAGTGCCAAGCAGCTCATCAAGAGCATTGTAGAAGCCTCCAAGGGC
TGCCAGCTGGGGAAGACAGAGCAAGGCTTTGAGAACATGGACTACTTTA
CTCTGGACTTAGAACACATAGCAGAGGCCTTGAGGGCCATTGACTTTGG
GACAGATGAGGAGGAGGAGGAGGAGGAGTTTACAGAAGAGGAGGCTGAT
GAGGAAGAGGGCGTGACCACAGAGGGTAAAGAAGAACACCAATGAAGAA
GGAGATGAGTGAGACACGCTCTGGACGCAGAGACGGGGGAGGTGGGGGC
AGGCCCATCTCGGGAGGGGGTTAGGGCTCCTTGGGGGGTACAATAGGGA
AGTGTGTCTTCTCTCTGCTCAGAGAGCAGGGACTAGCATAGGGCTCCCC
ACCACTGTGTCCAGCAGCTGCTGAAACACAATTGGAAATGTATCCAAAA
CGTCACAGGACACTTTTCTACGTTGGTGCGAAATGAAATATTTTGTATG
TTTTTAAAATGTGATTTTTGTATATACTTGTATATGTATGCCAATTTGG
TGCTTTTTGTACGAGAACTTTTGTATGATCACGCCTGGTCATTGTGTGA
CTGGCGATTGTCACAAAGTGGGAAGGAAGCCAAGACAATAGAGATGCCT
ACTTCCTTTCCTTGGTGGGAGGGCTGGGTCTCACTCGGTGGCCTAGAGA
GGGGCAATGTACTGTACAGTGCCCATCCCCAAACATGGGGATAGGACTG
AATTTGTGTTATATGTTGTTTTGCACAAGGGGCTGGGCCTTGGGGCACA
CACCCTTTGATCCCAGCACTCTGGAGGCAGAGGCAGTTGGATCTCTATG
AGTTCAAGGCCAGCCTGGTCTACATGGAGAGTTACAGGCCAGCCAGAGC
TACATAGAGAGACTCTGCCTCAAAAATAAAAATGAAAAAGAATAAAAAA
TAAACTCACAATGCTCTTTTCCTG.

[0497] In some embodiments, an oligonucleotide comprises a region of complementarity to a TRIM63 sequence as set forth in SEQ ID NO: 579 or SEQ ID NO: 580. In some embodiments, the oligonucleotide comprises a region of complementarity that is at least 80%, 85%, 90%, 95%, 96%, 97%, 98%, 99%, or 100% complementary to a TRIM63 sequence as set forth in SEQ ID NO: 579 or SEQ ID NO: 580. In some embodiments, the oligonucleotide comprises a sequence that has at least 10, 11, 12, 13, 14, 15, 16, 17, 18, or 19 consecutive nucleotides that are perfectly complementary to a TRIM63 sequence as set forth in SEQ ID NO: 579 or SEQ ID NO: 580. In some embodiments, an oligonucleotide may comprise a sequence that targets (e.g., is complementary to) an RNA version (i.e., wherein the T's are replaced with U's) of a TRIM63 sequence as set forth in SEQ ID NO: 579 or SEQ ID NO: 580. In some embodiments, the oligonucleotide comprises a sequence that is complementary (e.g., at least 80%, 85%, 90%, 95%, 96%, 97%, 98%, 99%, or 100% complementary) to an RNA version of a TRIM63 sequence as set forth in SEQ ID NO: 579 or SEQ ID NO: 580. In some embodiments, the oligonucleotide comprises a sequence that has at least 10, 11, 12, 13, 14, 15, 16, 17, 18, or 19 consecutive nucleotides that are perfectly complementary to an RNA version of a TRIM63 sequence as set forth in SEQ ID NO: 579 or SEQ ID NO: 580.

[0498] In some embodiments, a TRIM63-targeting oligonucleotide comprises an antisense strand that comprises at least 10, 11, 12, 13, 14, 15, 16, 17, 18, or 19 consecutive nucleotides of a sequence comprising any one of SEQ ID NOs: 629-652. In some embodiments, a TRIM63-targeting oligonucleotide comprises an antisense strand that comprises any one of SEQ ID NO: 629-652. In some embodiments, an oligonucleotide comprises an antisense strand that comprises shares at least 70%, 75%, 80%, 85%, 90%, 95%, or 97% sequence identity with at least 12 or at least 15 consecutive nucleotides of any one of SEQ ID NOs: 629-652.

[0499] In some embodiments, a TRIM63-targeting oligonucleotide comprises an antisense strand that targets a TRIM63 sequence comprising any one of SEQ ID NO: 581-628. In some embodiments, an oligonucleotide comprises an antisense strand comprising at least 10, 11, 12, 13, 14, 15, 16, 17, 18, or 19 nucleotides (e.g., consecutive nucleotides) that are complementary to a TRIM63 sequence comprising any one of SEQ ID NO: 581-628. In some embodiments, a TRIM63-targeting oligonucleotide comprises an antisense strand comprising a sequence that is at least 70%, 75%, 80%, 85%, 90%, 95%, or 97% complementary with at least 12 or at least 15 consecutive nucleotides of any one of SEQ ID NO: 581-628.

[0500] In some embodiments, a TRIM63-targeting oligonucleotide comprises an antisense strand comprises a region of complementarity to a target sequence as set forth in any one of SEQ ID NOs: 581-628. In some embodiments, the region of complementarity is at least 8, at least 9, at least 10, at least 11, at least 12, at least 13, at least 14, at least 15, at least 16, at least 17, or at least 19 nucleotides in length. In some embodiments, the region of complementarity is 8, 9, 10, 11, 12, 13, 14, 15, 16, 17, 18, or 19 nucleotides in length. In some embodiments, the region of complementarity is in the range of 8 to 20, 10 to 20 or 15 to 20 nucleotides in length. In some embodiments, the region of complementarity is fully complementary with all or a portion of its target sequence. In some embodiments, the region of complementarity includes 1, 2, 3 or more mismatches.

[0501] In some embodiments, a TRIM63-targeting oligonucleotide further comprises a sense strand that hybridizes to the antisense strand to form a double stranded siRNA. In some embodiments, the TRIM63-targeting oligonucleotide comprises an antisense strand that comprises the nucleotide sequence of any one of SEQ ID NOs: 629-652. In some embodiments, the TRIM63 targeting oligonucleotide further comprises a sense strand that comprises the nucleotide sequence of any one of SEQ ID NOs: 605-628.

[0502] In some embodiments, the TRIM63-targeing oligonucleotide is a double stranded oligonucleotide (e.g., an siRNA) comprising an antisense strand that comprises the nucleotide sequence of any one of SEQ ID NOs: 629-652 and a sense strand that hybridizes to the antisense strand and comprises the nucleotide sequence of any one of SEQ ID NOs: 605-628, wherein the antisense strand and/or (e.g., and) comprises one or more modified nucleosides (e.g., 2′-modified nucleosides). In some embodiment, the one or more modified nucleosides are selected from 2′-O-Me and 2′-F modified nucleosides.

[0503] In some embodiments, the TRIM63-targeing oligonucleotide is a double stranded oligonucleotide (e.g., an siRNA) comprising an antisense strand that comprises the nucleotide sequence of any one of SEQ ID NOs: 629-652 and a sense strand that hybridizes to the antisense strand and comprises the nucleotide sequence of any one of SEQ ID NOs: 605-628, wherein the each nucleoside in the antisense strand and/or (e.g., and) each nucleoside in the sense strand is a 2′-modified nucleoside selected from 2′-O-Me and 2′-F modified nucleosides.

[0504] In some embodiments, the TRIM63-targeing oligonucleotide is a double stranded oligonucleotide (e.g., an siRNA) comprising an antisense strand that comprises the nucleotide sequence of any one of SEQ ID NOs: 629-652 and a sense strand that hybridizes to the antisense strand and comprises the nucleotide sequence of any one of SEQ ID NOs: 605-628, wherein the each nucleoside in the antisense strand and each nucleoside in the sense strand is a 2′-modified nucleoside selected from 2′-O-Me and 2′-F modified nucleosides, and wherein the antisense strand and/or (e.g., and) the sense strand each comprises one or more phosphorothioate internucleoside linkages. In some embodiments, the sense strand does not comprise any phosphorothioate internucleoside linkages (all the internucleoside linkages in the sense strand are phosphodiester internucleoside linkages), and the antisense strand comprises 1, 2, or 3 phosphorothioate internucleoside linkages. In some embodiments, the antisense strand comprises 2 phosphorothioate internucleoside linkages, optionally wherein the two internucleoside linkages at the 3′ end of the antisense strand are phosphorothioate internucleoside linkages and the rest of the internucleoside linkages in the antisense strand are phosphodiester internucleoside linkages,

[0505] In some embodiments, the antisense strand of the TRIM63-targeing oligonucleotide comprises a structure of (5′ to 3′): fNfNmNfNmNfNmNfNmNfNmNfNmNfNmNfNmNfNmNfNmN*fN*mN, wherein “mN” indicates 2′-O-methyl (2′-O-Me) modified nucleosides; “fN” indicates 2′-fluoro (2′-F) modified nucleosides; “*” indicates phosphrothioate internucleoside linkage; and the absence of “*” between two nucleosides indicate phosphodiester internucleoside linkage.

[0506] In some embodiments, the sense strand of the TRIM63-targeing oligonucleotide comprises a structure of (5′ to 3′): mNmNfNmNfNmNfNmNfNmNfNmNfNmNfNmNfNmNfNmNfN, wherein “mN” indicates 2′-O-methyl (2′-O-Me) modified nucleosides; “fN” indicates 2′-fluoro (2′-F) modified nucleosides; and the absence of “*” between two nucleosides indicate phosphodiester internucleoside linkage.

[0507] In some embodiments, the antisense strand of the TRIM63-targeing oligonucleotide is selected from the modified version of SEQ ID NOs: 629-652 listed in Table 25. In some embodiments, the sense strand of the TRIM63-targeing oligonucleotide is selected from the modified version of SEQ ID NOs: 605-628 listed in Table 25. In some embodiments, the TRIM63-targeing oligonucleotide is a siRNA selected from the siRNAs listed in Table 25.

TABLE 23
TRIM63 Target Sequences

| | Corresponding | | |
|---|---|---|---|
| Reference | nucleotides of the | TRIM63 Target Sequence | SEQ ID |
| Sequence | Reference Sequence | (5’ to 3’) | NO: |
| NM_032588.3 | 1507-1525 | TATGTATGCCAATTTGGTG | 581 |
| (SEQ ID NO: 661) | | | |
| NM_032588.3 | 531-549 | AACATCTACTGTCTCACGT | 582 |
| (SEQ ID NO: 661) | | | |
| NM_032588.3 | 1505-1523 | TATATGTATGCCAATTTGG | 583 |
| (SEQ ID NO: 661) | | | |
| NM_032588.3 | 1715-1733 | AGTTTGTGTTATATGTTGT | 584 |
| (SEQ ID NO: 661) | | | |
| NM_032588.3 | 1534-1552 | AAAGGAACTTTTGTATAAT | 585 |
| (SEQ ID NO: 661) | | | |
| NM_032588.3 | 1737-1755 | AATAAATGCACAATGCTCT | 586 |
| (SEQ ID NO: 661) | | | |
| NM_032588.3 | 138-156 | AGAATGGATTATAAGTCGA | 587 |
| (SEQ ID NO: 661) | | | |
| NM_032588.3 | 157-175 | GCCTGATCCAGGATGGGAA | 588 |
| (SEQ ID NO: 661) | | | |
| NM_032588.3 | 87-105 | GAGCAAAGTTAGTAGAGGA | 589 |
| (SEQ ID NO: 661) | | | |
| NM_032588.3 | 574-592 | GCAAGGTGTTTGGGATCCA | 590 |
| (SEQ ID NO: 661) | | | |
| NM_032588.3 | 748-766 | ACCAGGTAAAGGAAGAGCT | 591 |
| (SEQ ID NO: 661) | | | |
| NM_032588.3 | 1386-1404 | AGCAGACACTGAACCAGAA | 592 |
| (SEQ ID NO: 661) | | | |
| NM_032588.3 | 565-583 | GCTCCATGTGCAAGGTGTT | 593 |
| (SEQ ID NO: 661) | | | |
| NM_001039048.2 | 1667-1685 | AATTTGTGTTATATGTTGT | 594 |
| (SEQ ID NO: 662) | | | |
| NM_001039048.2 | 1662-1680 | GACTGAATTTGTGTTATAT | 595 |
| (SEQ ID NO: 662) | | | |
| NM_001039048.2 | 522-540 | CCTACTTGCTCCTTGTGCA | 596 |
| (SEQ ID NO: 662) | | | |
| NM_001039048.2 | 469-487 | GCAAGGAACACGAAGACGA | 597 |
| (SEQ ID NO: 662) | | | |
| NM_001039048.2 | 1009-1027 | TTGAGAACATGGACTACTT | 598 |
| (SEQ ID NO: 662) | | | |
| NM_001039048.2 | 1660-1678 | AGGACTGAATTTGTGTTAT | 599 |
| (SEQ ID NO: 662) | | | |
| NM_001039048.2 | 526-544 | CTTGCTCCTTGTGCAAGGT | 600 |
| (SEQ ID NO: 662) | | | |
| NM_001039048.2 | 237-255 | CGGAAGTGTGCCAACGACA | 601 |
| (SEQ ID NO: 662) | | | |
| NM_001039048.2 | 493-511 | TCAACATCTACTGTCTCAC | 602 |
| (SEQ ID NO: 662) | | | |
| NM_001039048.2 | 952-970 | TCAAGAGCATTGTAGAAGC | 603 |
| (SEQ ID NO: 662) | | | |
| NM_001039048.2 | 1447-1465 | ACTTGTATATGTATGCCAA | 604 |
| (SEQ ID NO: 662) | | | |

*The target sequences contain Ts, but binding to RNA and/or DNA is contemplated.

[0508] In some embodiments, an oligonucleotide may comprise or consist of any sequence as provided in Table 24.

TABLE 24
Oligonucleotide sequences for targeting TRIM63

| Passenger Strand/ | | Guide Strand/ | |
|---|---|---|---|
| Sense Strand | SEQ ID | Antisense Strand | SEQ ID |
| (RNA) (5’ to 3’) | NO: | (RNA) (5’ to 3’) | NO: |
| UAUAUGUAUGCCAAUUUGGUG | 605 | CACCAAAUUGGCAUACAUAUACA | 629 |
| UCAACAUCUACUGUCUCACGU | 606 | ACGUGAGACAGUAGAUGUUGAU | 630 |
| | | U | |
| UGUAUAUGUAUGCCAAUUUGG | 607 | CCAAAUUGGCAUACAUAUACAAG | 631 |
| UGAGUUUGUGUUAUAUGUUGU | 608 | ACAACAUAUAACACAAACUCAGU | 632 |
| GUAAAGGAACUUUUGUAUAAU | 609 | AUUAUACAAAAGUUCCUUUACAA | 633 |
| UUAAUAAAUGCACAAUGCUCU | 610 | AGAGCAUUGUGCAUUUAUUAAA | 634 |
| | | A | |
| ACAGAAUGGAUUAUAAGUCGA | 611 | UCGACUUAUAAUCCAUUCUGUGG | 635 |
| GAGCCUGAUCCAGGAUGGGAA | 612 | UUCCCAUCCUGGAUCAGGCUCGA | 636 |
| UAGAGCAAAGUUAGUAGAGGA | 613 | UCCUCUACUAACUUUGCUCUAAG | 637 |
| GUGCAAGGUGUUUGGGAUCCA | 614 | UGGAUCCCAAACACCUUGCACAU | 638 |
| UCACCAGGUAAAGGAAGAGCU | 615 | AGCUCUUCCUUUACCUGGUGACU | 639 |
| CCAGCAGACACUGAACCAGAA | 616 | UUCUGGUUCAGUGUCUGCUGGAC | 640 |
| CUGCUCCAUGUGCAAGGUGUU | 617 | AACACCUUGCACAUGGAGCAGGU | 641 |
| UGAAUUUGUGUUAUAUGUUGU | 618 | ACAACAUAUAACACAAAUUCAGU | 642 |
| AGGACUGAAUUUGUGUUAUAU | 619 | AUAUAACACAAAUUCAGUCCUAU | 643 |
| UGCCUACUUGCUCCUUGUGCA | 620 | UGCACAAGGAGCAAGUAGGCACC | 644 |
| GUGCAAGGAACACGAAGACGA | 621 | UCGUCUUCGUGUUCCUUGCACAU | 645 |
| CUUUGAGAACAUGGACUACUU | 622 | AAGUAGUCCAUGUUCUCAAAGCC | 646 |
| AUAGGACUGAAUUUGUGUUAU | 623 | AUAACACAAAUUCAGUCCUAUCC | 647 |
| UACUUGCUCCUUGUGCAAGGU | 624 | ACCUUGCACAAGGAGCAAGUAGG | 648 |
| GCCGGAAGUGUGCCAACGACA | 625 | UGUCGUUGGCACACUUCCGGCAG | 649 |
| AAUCAACAUCUACUGUCUCAC | 626 | GUGAGACAGUAGAUGUUGAUUU | 650 |
| | | U | |
| CAUCAAGAGCAUUGUAGAAGC | 627 | GCUUCUACAAUGCUCUUGAUGAG | 651 |
| AUACUUGUAUAUGUAUGCCAA | 628 | UUGGCAUACAUAUACAAGUAUAU | 652 |

[0509] In some embodiments, an oligonucleotide is a modified oligonucleotide as provided in Table 25, wherein ‘mN’ represents a 2′-O-methyl modified nucleoside (e.g., mU is 2′-O-methyl modified uridine), ‘fN’ represents a 2′-fluoro modified nucleoside (e.g., fU is 2′-fluoro modified uridine), ‘*’ represents a phosphorothioate internucleoside linkage, and lack of “*” between nucleosides indicate phosphodiester internucleoside linkage.

TABLE 25
Modified Oligonucleotides for targeting TRIM63

| | Modified Passenger | | Modified Guide | |
|---|---|---|---|---|
| | Strand/ | SEQ ID | Strand/ | SEQ ID |
| siRNA # | Sense Strand (RNA) | NO: | Antisense Strand (RNA) | NO: |
| hsTRIM63-1 | mUmAfUmAfUmGfUmAfU | 605 | fCfAmCfCmAfAmAfUmUfGmGf | 629 |
| | mGfCmCfAmAfUmUfUmGf | | CmAfUmAfCmAfUmAfUmA*fC | |
| | GmUfG | | *mA | |
| hsTRIM63-2 | mUmCfAmAfCmAfUmCfUm | 606 | fAfCmGfUmGfAmGfAmCfAmGf | 630 |
| | AfCmUfGmUfCmUfCmAfC | | UmAfGmAfUmGfUmUfGmA*fU | |
| | mGfU | | *mU | |
| hsTRIM63-3 | mUmGfUmAfUmAfUmGfU | 607 | fCfCmAfAmAfUmUfGmGfCmAf | 631 |
| | mAfUmGfCmCfAmAfUmUf | | UmAfCmAfUmAfUmAfCmA*fA | |
| | UmGfG | | *mG | |
| hsTRIM63-4 | mUmGfAmGfUmUfUmGfU | 608 | fAfCmAfAmCfAmUfAmUfAmAf | 632 |
| | mGfUmUfAmUfAmUfGmUf | | CmAfCmAfAmAfCmUfCmA*fG | |
| | UmGfU | | *mU | |
| hsTRIM63-5 | mGmUfAmAfAmGfGmAfA | 609 | fAfUmUfAmUfAmCfAmAfAmAf | 633 |
| | mCfUmUfUmUfGmUfAmUf | | GmUfUmCfCmUfUmUfAmC*fA | |
| | AmAfU | | *mA | |
| hsTRIM63-6 | mUmUfAmAfUmAfAmAfU | 610 | fAfGmAfGmCfAmUfUmGfUmGf | 634 |
| | mGfCmAfCmAfAmUfGmCf | | CmAfUmUfUmAfUmUfAmA*fA | |
| | UmCfU | | *mA | |
| hsTRIM63-7 | mAmCfAmGfAmAfUmGfG | 611 | fUfCmGfAmCfUmUfAmUfAmAf | 635 |
| | mAfUmUfAmUfAmAfGmUf | | UmCfCmAfUmUfCmUfGmU*fG | |
| | CmGfA | | *mG | |
| hsTRIM63-8 | mGmAfGmCfCmUfGmAfUm | 612 | fUfUmCfCmCfAmUfCmCfUmGf | 636 |
| | CfCmAfGmGfAmUfGmGfG | | GmAfUmCfAmGfGmCfUmC*fG | |
| | mAfA | | *mA | |
| hsTRIM63-9 | mUmAfGmAfGmCfAmAfA | 613 | fUfCmCfUmCfUmAfCmUfAmAf | 637 |
| | mGfUmUfAmGfUmAfGmAf | | CmUfUmUfGmCfUmCfUmA*fA | |
| | GmGfA | | *mG | |
| hsTRIM63-10 | mGmUfGmCfAmAfGmGfU | 614 | fUfGmGfAmUfCmCfCmAfAmAf | 638 |
| | mGfUmUfUmGfGmGfAmUf | | CmAfCmCfUmUfGmCfAmC*fA | |
| | CmCfA | | *mU | |
| hsTRIM63-11 | mUmCfAmCfCmAfGmGfUm | 615 | fAfGmCfUmCfUmUfCmCfUmUf | 639 |
| | AfAmAfGmGfAmAfGmAfG | | UmAfCmCfUmGfGmUfGmA*fC | |
| | mCfU | | *mU | |
| hsTRIM63-12 | mCmCfAmGfCmAfGmAfCm | 616 | fUfUmCfUmGfGmUfUmCfAmGf | 640 |
| | AfCmUfGmAfAmCfCmAfG | | UmGfUmCfUmGfCmUfGmG*fA | |
| | mAfA | | *mC | |
| hsTRIM63-13 | mCmUfGmCfUmCfCmAfUm | 617 | fAfAmCfAmCfCmUfUmGfCmAf | 641 |
| | GfUmGfCmAfAmGfGmUfG | | CmAfUmGfGmAfGmCfAmG*fG | |
| | mUfU | | *mU | |
| mmTRIM63- | mUmGfAmAfUmUfUmGfU | 618 | fAfCmAfAmCfAmUfAmUfAmAf | 642 |
| 1 | mGfUmUfAmUfAmUfGmUf | | CmAfCmAfAmAfUmUfCmA*fG | |
| | UmGfU | | *mU | |
| mmTRIM63- | mAmGfGmAfCmUfGmAfA | 619 | fAfUmAfUmAfAmCfAmCfAmAf | 643 |
| 2 | mUfUmUfGmUfGmUfUmAf | | AmUfUmCfAmGfUmCfCmU*fA | |
| | UmAfU | | *mU | |
| mmTRIM63- | mUmGfCmCfUmAfCmUfUm | 620 | fUfGmCfAmCfAmAfGmGfAmGf | 644 |
| 3 | GfCmUfCmCfUmUfGmUfG | | CmAfAmGfUmAfGmGfCmA*fC | |
| | mCfA | | *mC | |
| mmTRIM63- | mGmUfGmCfAmAfGmGfA | 621 | fUfCmGfUmCfUmUfCmGfUmGf | 645 |
| 4 | mAfCmAfCmGfAmAfGmAf | | UmUfCmCfUmUfGmCfAmC*fA | |
| | CmGfA | | *mU | |
| mmTRIM63- | mCmUfUmUfGmAfGmAfA | 622 | fAfAmGfUmAfGmUfCmCfAmUf | 646 |
| 5 | mCfAmUfGmGfAmCfUmAf | | GmUfUmCfUmCfAmAfAmG*fC | |
| | CmUfU | | *mC | |
| mmTRIM63- | mAmUfAmGfGmAfCmUfG | 623 | fAfUmAfAmCfAmCfAmAfAmUf | 647 |
| 6 | mAfAmUfUmUfGmUfGmUf | | UmCfAmGfUmCfCmUfAmU*fC | |
| | UmAfU | | *mC | |
| mmTRIM63- | mUmAfCmUfUmGfCmUfCm | 624 | fAfCmCfUmUfGmCfAmCfAmAf | 648 |
| 7 | CfUmUfGmUfGmCfAmAfG | | GmGfAmGfCmAfAmGfUmA*fG | |
| | mGfU | | *mG | |
| mmTRIM63- | mGmCfCmGfGmAfAmGfUm | 625 | fUfGmUfCmGfUmUfGmGfCmAf | 649 |
| 8 | GfUmGfCmCfAmAfCmGfA | | CmAfCmUfUmCfCmGfGmC*fA | |
| | mCfA | | *mG | |
| mmTRIM63- | mAmAfUmCfAmAfCmAfUm | 626 | fGfUmGfAmGfAmCfAmGfUmAf | 650 |
| 9 | CfUmAfCmUfGmUfCmUfC | | GmAfUmGfUmUfGmAfUmU*fU | |
| | mAfC | | *mU | |
| mmTRIM63- | mCmAfUmCfAmAfGmAfGm | 627 | fGfCmUfUmCfUmAfCmAfAmUf | 651 |
| 10 | CfAmUfUmGfUmAfGmAfA | | GmCfUmCfUmUfGmAfUmG*fA | |
| | mGfC | | *mG | |
| mmTRIM63- | mAmUfAmCfUmUfGmUfA | 628 | fUfUmGfGmCfAmUfAmCfAmUf | 652 |
| 11 | mUfAmUfGmUfAmUfGmCf | | AmUfAmCfAmAfGmUfAmU*fA | |
| | CmAfA | | *mU | |

[0510] h. MEF2D Oligonucleotides

[0511] Examples of oligonucleotides useful for targeting MEF2D) are provided in Li et al., Am J Cancer Res. 2019; 9(5): 887-905; Hu et al., Oncotarget. 2017 Nov. 3; 8(54): 92079-92089; Martis et al., BMC Cancer volume 18, Article number: 1217 (2018); Estrella et al., The Journal of Biological Chemistry, 290, 24367-24380, 2015; Ma et al., Cancer Res; 74(5) Mar. 1, 2014; and Sacilotto et al., Genes & Dev. Oct. 15, 2016 vol. 30 no. 20 2297-2309, the contents of each of which are incorporated herein in their entirety.

[0512] In some embodiments, oligonucleotides may have a region of complementarity to a human MEF2D) sequence, for example, as provided below (Gene ID: 4209; NCBI Ref. No: NM_005920.4):

(SEQ ID NO: 664)
GAGTTACCTTTGGAGCCCGAAAGGAGGAAGGAAGCAAAATATCAACAACAGCCGAGGCGGCTCAGG
CGCTCGGCCCCGGTTCCCCGCTTGCCTGCCGCCCGCCTGCTGGCCCCCGCGCCCACGACGGGGGCCCA
GGCCTCACGGCGCCGCCCAGGGCCCGCGCGGACGCCGGCCTCATTTATTATTCTCCCCGCCCGGAGCT
GCGGCTTCCCGGTGTTGAAGATCCCCCGGACCAGGGGCGAGGGCTACCCGCTCTTTGCCGTGACAACA
CCGTTCCCCCAGCCGGGCTGGAGGCTGTGCAGAAGGTATCCTGCAGACCATGAACTGAGCACTGTTCC
CAGACCGTTCATGAGCACAGTGTAAGGTGTGCCGAGACCCACCACCCAGCGAGCCCCTCCCCTCCGTA
GCACTGAGGACCCCCGGAGAAGATGGGGAGGAAAAAGATTCAGATCCAGCGAATCACCGACGAGCG
GAACCGACAGGTGACTTTCACCAAGCGGAAGTTTGGCCTGATGAAGAAGGCGTATGAGCTGAGCGTG
CTATGTGACTGCGAGATCGCACTCATCATCTTCAACCACTCCAACAAGCTGTTCCAGTACGCCAGCAC
CGACATGGACAAGGTGCTGCTCAAGTACACGGAGTACAATGAGCCACACGAGAGCCGCACCAACGCC
GACATCATCGAGACCCTGAGGAAGAAGGGCTTCAACGGCTGCGACAGCCCCGAGCCCGACGGGGAG
GACTCGCTGGAACAGAGCCCCCTGCTGGAGGACAAGTACCGACGCGCCAGCGAGGAGCTCGACGGGC
TCTTCCGGCGCTATGGGTCAACTGTCCCGGCCCCCAACTTTGCCATGCCTGTCACGGTGCCCGTGTCCA
ATCAGAGCTCACTGCAGTTCAGCAATCCCAGCGGCTCCCTGGTCACCCCTTCCCTGGTGACATCATCC
CTCACGGACCCGCGGCTCCTGTCCCCCCAGCAGCCAGCACTACAGAGGAACAGTGTGTCTCCTGGCCT
GCCCCAGCGGCCAGCTAGTGCGGGGGCCATGCTGGGGGGTGACCTGAACAGTGCTAACGGAGCCTGC
CCCAGCCCTGTTGGGAATGGCTACGTCAGTGCTCGGGCTTCCCCTGGCCTCCTCCCTGTGGCCAATGG
CAACAGCCTAAACAAGGTCATCCCTGCCAAGTCTCCACCCCCACCTACCCACAGCACCCAGCTTGGAG
CCCCCAGCCGCAAGCCCGACCTGCGAGTCATCACTTCCCAGGCAGGAAAGGGGTTAATGCATCACTTG
ACTGAGGACCATTTAGATCTGAACAATGCCCAGCGCCTTGGGGTCTCCCAGTCTACTCATTCGCTCAC
CACCCCAGTGGTTTCTGTGGCAACGCCGAGTTTACTCAGCCAGGGCCTCCCCTTCTCTTCCATGCCCAC
TGCCTACAACACAGATTACCAGTTGACCAGTGCAGAGCTCTCCTCCTTACCAGCCTTTAGTTCACCTGG
GGGGCTGTCGCTAGGCAATGTCACTGCCTGGCAACAGCCACAGCAGCCCCAGCAGCCGCAGCAGCCA
CAGCCTCCACAGCAGCAGCCACCGCAGCCACAGCAGCCACAGCCACAGCAGCCTCAGCAGCCGCAAC
AGCCACCTCAGCAACAGTCCCACCTGGTCCCTGTATCTCTCAGCAACCTCATCCCGGGCAGCCCCCTG
CCCCACGTGGGTGCTGCCCTCACAGTCACCACCCACCCCCACATCAGCATCAAGTCAGAACCGGTGTC
CCCAAGCCGTGAGCGCAGCCCTGCGCCTCCCCCTCCAGCTGTGTTCCCAGCTGCCCGCCCTGAGCCTG
GCGATGGTCTCAGCAGCCCAGCCGGGGGATCCTATGAGACGGGAGACCGGGATGACGGACGGGGGG
ACTTCGGGCCCACACTGGGCCTGCTGCGCCCAGCCCCAGAGCCTGAGGCTGAGGGCTCAGCTGTGAA
GAGGATGCGGCTTGATACCTGGACATTAAAGTGACGATTCCCACTCCCCTCCTCTCAGCCTCCCTGAT
GAAGAGTTGACAATCTCACCGCCCGCCCTTCCCTGCCCCGGGCTCCTCCCGCTCGACCCCCACTTCCTT
TCTTGTGCTTCGTGTCCTGTTGACGGTTACATTTGTGTATAATTATTATATTATTATTATTATTATTATA
TTTTTTTTAATTTGGATTCTCGCTTTGGAGAGGGGGATGCTCTCATCCCCTCTTTCTGTACCCCCCACCA
TTTTCACTGGCTGGGGGGCTCTCTTTTTCGCGGGAAGGGGGGACACTTTGCACGTTGTACACATATGCT
GCAGGAAGGGGGTGGGGGGCCCAATAAGGCCTTTGGGAAAGGACAGGTGCCGAGCCCTGCATGTGG
AGCCCTCCCACCCCACCCCCAGATAGAGGGAAATAACCAAAAAACTACCAAACAACAGAAACCCACA
CTCTAGACTGAAACCCCAAAGTGGGCTTGATGGGTGGGTTTGTGTTTCAAGGGGAAAGTGAGGCAGA
GGTTCTGAAAAGGGTCTCTGTTTTTGTGTTCATGTAGCCATAGGCACATGGAGCAGAATACTTAAGCC
TGGCCCCCAAATGCCCCTGCACACACACGTGCCACACCTGCGCTGATTCTTGTGTGTGCTGCACCCCC
AAGGTGTGTGGGTGCTGGCTGAGCTTTGGGCCGGGAAGGCAGCCTGGGAATCTGAGGCTGGAGACAG
GGGTTTGAGGTGGGGGCCTCTCTGGAAGCACATTTGGAGGGAAAGACAAGAGAGCCATGAGGAGAG
GGCTGAGGAGGGCAGAAGGGCTAGGCAGGGGGCAAATTGAGCCCCTCCCTTCCCCAGTTTTTCTCTAA
GATATACAGTGCAATAGCTCCCCACCCCTCAGTTGACGCCAGCCCTGTAAAGCTGGCCACAGTGTGCA
GGGAGAATGGGGAGAGGGTCTTCAGTGAGGTGGCTGGGGCGAGAGTCGGCCTGGACTTCCCTGGGGT
GCTCCAGGCCAGAGCTCTTTCATTGGGGCGAGTGTGGTGAGGGGACGTCCTTGGTCTTGCACGCACAC
TACCTGGGGGAGTCAACACTGGGATGGTCTGTGGGGTGGGAGGGCCTACGGATGGGTCCGTAGAGGT
CCCACCTCCCTCATTCCTCCTTGGCCCCTCTCCCTAGCTTCTCCTGTTAGCTCCTTCTGCTCCTGACCCC
ACCTCCTTGCTCTTGGCGCCCCTATTGTCTCTGGCTACCTCCTTGTCCCACCACCTCCAGGCTGCATCCC
ACCTTCCCTCTTGGCTACTGTAATTGTAAATAGCGACCTTTGGAAAACGTTAGCGGTGTAACAGTCCA
GGAAACTGTTTTTTTTTGTTGTTGTTGTATTGATATGAAATGAGATTCTATTTTTGTCAAAGTATATTGT
AATAATAATGACTCAAACGGCCCGTACTGTACAGACGAGATTCTTCTGCTGTTGTTCTTGCTCCCCTCC
CCTCCTCTGAGTCCGCCCCTCCCTGCTGCCTCCTCAGTGGGGCAGTGGGCAAGGGGCCCAGGGGCAGC
CGAAGCACGGGGTCCTGAGACCTCAGGCAGGATTGGAGATCAAACCAGAGGGGGCAGGCCCCCAGC
CTGCTCTCTAGGATCACCCCCCGCCCTAAGGGGCCTGGCCTGGGGTGACGTGGCCAGGCAGACTGTCT
GCCCCACTCCTTCACACAAGCCCAGCTCCTCTGCCCAAGGGGTGCGGCGCCCCCTTGGGGTTTCCTCC
CAGTTGGAGAGTAGAGTTAAGACAAGGCCCAGTTTTGTGTTAGCCGACCGTCTTTGCCCACCTCTATG
ACCCAGCCTCTTGCAGTATTCCCATACTTGATGCAGGGAAGGAACCAGAAGCAGAGGGGCCTCTACG
CAGGTACACACGTGTACCTGAGTGTGTTCATGAGGGCATCTGGTGTTTATGTGTCTGAGTGTAGCTTTG
TATTTATGTGTGTGTGTGTGTGTATGTCTGATTGCACGGGTGTACTTTTGTATTTATGTGTGTGTGTGGT
TGCACGGGTGTGCCTCTGTGTGTCTCTGACCCTGGCTGGGTGTGTGTGCAAATCTGTGTGACTGGAGCT
CTAGGGGCATCTCTGTGTCTGAGTGTGCCTGGTGTGTGTTTACAAAGGGAGAGTTGGCTGCTCCAGCT
CCACAGCCCTGGGACCCCAACTCCTGTCTTCCCTGCTCCTTTCCCTGTGTTCACCCTCAGCTCTGACAC
ATTGAACTGCAGTTGGGGGGATTGGCAGTTAGCCCTCTGTGCTTCTCCCTGCAGCCCTACCTCTGCCAA
GGTCTCTCCCTCCAGGGACCTCTGCTTCCACCCACATATGTCCACTTAGTCACCCACACTTGACACAGT
TCCTGGAGTACCCTCTTCCCCCAACCCCAGACCTGCTTTCAGAGCAAAACTCAAGTCCCTCTTCCTCCG
TGAAGCTTCTCCCTCAGCTGAGCAGTGATCACTTACTCACTCTTAACCCCAATCCGCTGACTGGGTGG
GGACAGCACGTCCAGCCTTCCCACCTCTCCTGCAGGCTTCTAGACGGAGTTTCAAAAACTGATGAGCC
TCGATCCAGGGCTTGAAAGAAGCCAGGGTGTAATCTTGTTCATGCATGCGTCCCCAGAGCCTCGCCCA
GTGCCTGGCACATAGTAGGCACTCAATAAATGCTGAATGGGTGAATAGTTGAATGATAGGTGCTCAAT
AAATGAATGAATGGCCTTCCCTTCTCAGGCTATTCCCACCATTAGTCTGCCCACCTTTCTAGGCTGGGC
TTGGCCACCATTAAACACGGGGTGGGGGTGAGGGCCCCTGCAATTCACGGTGCAATATTCACCAGTTT
TGCCCTCTGCCTCATAAAGGCAAACCTGGCTTTTGATTACCATGTGTGGATGTTTCAGTGTCCTTTCTT
CTCTGTCCCTGGGGATGGGGTGGTCTGTGAATATGTGACATTTCTGCAGTTCAGTATCCGAAGGTTTCT
CTTGGGGGTAGGGGCTCCTGGGCGGCCAGATGAATGGGTCCCTGGGAACCCAGACCTCAGATGAGGA
CTTAATGTCTTCTTCCTCTCAAGCCAAATTCGCCTCCACCCACTCCCTCTGAAGAACTGGGCATTTGCC
AAAGTAACCACTGGAGTCATCTAATGGCCCTCCCCCTCCCCAGGTTTCCCACAGCTTTCAGGGACAGT
GGGCAAGAGGACACCCCCCCCCACCACCTCAGTGGAACACACCATTCTCCCCCCCTCAACAGCACACT
CAGTGCAGCAAGACTGACCCCTGACCCCCTCCCAGCCCTCCCTACCTTGGACAGGAAGGAAGTAATGC
ACCTTCTCTTGCTGATTATTTATTTGTTTGGAGAGACAGAAATGTAAAAGTGTATCTAGAAATATCTAT
ATCTCTATATATTTTTAACTGACTCTTTGGAATCCCCTGGGGTGGGGTGAGGGGTAAGTTTAGGCTTTC
GCGGAGGGGAGGAGACATGGAGCCTGGGAACTCCTTGTTCTCCCCTCTGCTGCCTCTCCCCACCCCTT
AAAGCAGTTGGTAGAAGGAATGGTATTTGTATGGGGGGAGGGAGGCTGGAATGGAGAATCTGGATTC
TCTCCTCTTCCCCATTCTCCAGAGGGAGGGAGGTGGTGAGGAAGAGGAAGGGAGGGGCAGGATGGGC
CATGGAGGTGCCCCACCCCCACACCTGACAATCACCCACACTCCTGGGGCTCTTCCTGGGTCCTGGGG
CAGGGCGAGTCCAAGTGTGAGGCTGTTGATTTGTTTTCAATATTTCTTTTCGTGCTGTATGGTGATGCT
TTCTTAGTATTCTACACAATAAGAAAAGACAAAGTCCTCGAGATTCTTATGAGTTTTGTTTGAAAACTC
TTTCACTATATTTGTTGTAAAGAGGTTTACTATTAAAAGAAAAAGAATACACGTTTCTGATA.

[0513] In some embodiments, oligonucleotides may have a region of complementarity to a human MEF2D sequence, for example, as provided below (Gene ID: 4209; NCBI Ref. No: NM_001271629.2):

(SEQ ID NO: 665)
ATACCGTGTGCTCCCCTTGGCAAGTCGGTTCCTGTCCCTTAAGCTGAGACTGCAGGGCCTGCCCCCCAT
TTGAGTTCTTAGGGTGCCTGGGGCCTGAGACCACCCCTGCCCTAGGCCCAGCTTTCCTGGACTGCCTG
CCCCCACAAACCAACAGCCCGCCCCCAGGTCCCCAGTCGAAGGTATCCTGCAGACCATGAACTGAGC
ACTGTTCCCAGACCGTTCATGAGCACAGTGTAAGGTGTGCCGAGACCCACCACCCAGCGAGCCCCTCC
CCTCCGTAGCACTGAGGACCCCCGGAGAAGATGGGGAGGAAAAAGATTCAGATCCAGCGAATCACCG
ACGAGCGGAACCGACAGGTGACTTTCACCAAGCGGAAGTTTGGCCTGATGAAGAAGGCGTATGAGCT
GAGCGTGCTATGTGACTGCGAGATCGCACTCATCATCTTCAACCACTCCAACAAGCTGTTCCAGTACG
CCAGCACCGACATGGACAAGGTGCTGCTCAAGTACACGGAGTACAATGAGCCACACGAGAGCCGCAC
CAACGCCGACATCATCGAGACCCTGAGGAAGAAGGGCTTCAACGGCTGCGACAGCCCCGAGCCCGAC
GGGGAGGACTCGCTGGAACAGAGCCCCCTGCTGGAGGACAAGTACCGACGCGCCAGCGAGGAGCTC
GACGGGCTCTTCCGGCGCTATGGGTCAACTGTCCCGGCCCCCAACTTTGCCATGCCTGTCACGGTGCC
CGTGTCCAATCAGAGCTCACTGCAGTTCAGCAATCCCAGCGGCTCCCTGGTCACCCCTTCCCTGGTGA
CATCATCCCTCACGGACCCGCGGCTCCTGTCCCCCCAGCAGCCAGCACTACAGAGGAACAGTGTGTCT
CCTGGCCTGCCCCAGCGGCCAGCTAGTGCGGGGGCCATGCTGGGGGGTGACCTGAACAGTGCTAACG
GAGCCTGCCCCAGCCCTGTTGGGAATGGCTACGTCAGTGCTCGGGCTTCCCCTGGCCTCCTCCCTGTG
GCCAATGGCAACAGCCTAAACAAGGTCATCCCTGCCAAGTCTCCACCCCCACCTACCCACAGCACCCA
GCTTGGAGCCCCCAGCCGCAAGCCCGACCTGCGAGTCATCACTTCCCAGGCAGGAAAGGGGTTAATG
CATCACTTGAACAATGCCCAGCGCCTTGGGGTCTCCCAGTCTACTCATTCGCTCACCACCCCAGTGGTT
TCTGTGGCAACGCCGAGTTTACTCAGCCAGGGCCTCCCCTTCTCTTCCATGCCCACTGCCTACAACACA
GATTACCAGTTGACCAGTGCAGAGCTCTCCTCCTTACCAGCCTTTAGTTCACCTGGGGGGCTGTCGCTA
GGCAATGTCACTGCCTGGCAACAGCCACAGCAGCCCCAGCAGCCGCAGCAGCCACAGCCTCCACAGC
AGCAGCCACCGCAGCCACAGCAGCCACAGCCACAGCAGCCTCAGCAGCCGCAACAGCCACCTCAGCA
ACAGTCCCACCTGGTCCCTGTATCTCTCAGCAACCTCATCCCGGGCAGCCCCCTGCCCCACGTGGGTG
CTGCCCTCACAGTCACCACCCACCCCCACATCAGCATCAAGTCAGAACCGGTGTCCCCAAGCCGTGAG
CGCAGCCCTGCGCCTCCCCCTCCAGCTGTGTTCCCAGCTGCCCGCCCTGAGCCTGGCGATGGTCTCAG
CAGCCCAGCCGGGGGATCCTATGAGACGGGAGACCGGGATGACGGACGGGGGGACTTCGGGCCCAC
ACTGGGCCTGCTGCGCCCAGCCCCAGAGCCTGAGGCTGAGGGCTCAGCTGTGAAGAGGATGCGGCTT
GATACCTGGACATTAAAGTGACGATTCCCACTCCCCTCCTCTCAGCCTCCCTGATGAAGAGTTGACAA
TCTCACCGCCCGCCCTTCCCTGCCCCGGGCTCCTCCCGCTCGACCCCCACTTCCTTTCTTGTGCTTCGTG
TCCTGTTGACGGTTACATTTGTGTATAATTATTATATTATTATTATTATTATTATATTTTTTTTAATTTGG
ATTCTCGCTTTGGAGAGGGGGATGCTCTCATCCCCTCTTTCTGTACCCCCCACCATTTTCACTGGCTGG
GGGGCTCTCTTTTTCGCGGGAAGGGGGGACACTTTGCACGTTGTACACATATGCTGCAGGAAGGGGGT
GGGGGGCCCAATAAGGCCTTTGGGAAAGGACAGGTGCCGAGCCCTGCATGTGGAGCCCTCCCACCCC
ACCCCCAGATAGAGGGAAATAACCAAAAAACTACCAAACAACAGAAACCCACACTCTAGACTGAAA
CCCCAAAGTGGGCTTGATGGGTGGGTTTGTGTTTCAAGGGGAAAGTGAGGCAGAGGTTCTGAAAAGG
GTCTCTGTTTTTGTGTTCATGTAGCCATAGGCACATGGAGCAGAATACTTAAGCCTGGCCCCCAAATG
CCCCTGCACACACACGTGCCACACCTGCGCTGATTCTTGTGTGTGCTGCACCCCCAAGGTGTGTGGGT
GCTGGCTGAGCTTTGGGCCGGGAAGGCAGCCTGGGAATCTGAGGCTGGAGACAGGGGTTTGAGGTGG
GGGCCTCTCTGGAAGCACATTTGGAGGGAAAGACAAGAGAGCCATGAGGAGAGGGCTGAGGAGGGC
AGAAGGGCTAGGCAGGGGGCAAATTGAGCCCCTCCCTTCCCCAGTTTTTCTCTAAGATATACAGTGCA
ATAGCTCCCCACCCCTCAGTTGACGCCAGCCCTGTAAAGCTGGCCACAGTGTGCAGGGAGAATGGGG
AGAGGGTCTTCAGTGAGGTGGCTGGGGCGAGAGTCGGCCTGGACTTCCCTGGGGTGCTCCAGGCCAG
AGCTCTTTCATTGGGGCGAGTGTGGTGAGGGGACGTCCTTGGTCTTGCACGCACACTACCTGGGGGAG
TCAACACTGGGATGGTCTGTGGGGTGGGAGGGCCTACGGATGGGTCCGTAGAGGTCCCACCTCCCTCA
TTCCTCCTTGGCCCCTCTCCCTAGCTTCTCCTGTTAGCTCCTTCTGCTCCTGACCCCACCTCCTTGCTCTT
GGCGCCCCTATTGTCTCTGGCTACCTCCTTGTCCCACCACCTCCAGGCTGCATCCCACCTTCCCTCTTG
GCTACTGTAATTGTAAATAGCGACCTTTGGAAAACGTTAGCGGTGTAACAGTCCAGGAAACTGTTTTT
TTTTGTTGTTGTTGTATTGATATGAAATGAGATTCTATTTTTGTCAAAGTATATTGTAATAATAATGAC
TCAAACGGCCCGTACTGTACAGACGAGATTCTTCTGCTGTTGTTCTTGCTCCCCTCCCCTCCTCTGAGT
CCGCCCCTCCCTGCTGCCTCCTCAGTGGGGCAGTGGGCAAGGGGCCCAGGGGCAGCCGAAGCACGGG
GTCCTGAGACCTCAGGCAGGATTGGAGATCAAACCAGAGGGGGCAGGCCCCCAGCCTGCTCTCTAGG
ATCACCCCCCGCCCTAAGGGGCCTGGCCTGGGGTGACGTGGCCAGGCAGACTGTCTGCCCCACTCCTT
CACACAAGCCCAGCTCCTCTGCCCAAGGGGTGCGGCGCCCCCTTGGGGTTTCCTCCCAGTTGGAGAGT
AGAGTTAAGACAAGGCCCAGTTTTGTGTTAGCCGACCGTCTTTGCCCACCTCTATGACCCAGCCTCTTG
CAGTATTCCCATACTTGATGCAGGGAAGGAACCAGAAGCAGAGGGGCCTCTACGCAGGTACACACGT
GTACCTGAGTGTGTTCATGAGGGCATCTGGTGTTTATGTGTCTGAGTGTAGCTTTGTATTTATGTGTGT
GTGTGTGTGTATGTCTGATTGCACGGGTGTACTTTTGTATTTATGTGTGTGTGTGGTTGCACGGGTGTG
CCTCTGTGTGTCTCTGACCCTGGCTGGGTGTGTGTGCAAATCTGTGTGACTGGAGCTCTAGGGGCATCT
CTGTGTCTGAGTGTGCCTGGTGTGTGTTTACAAAGGGAGAGTTGGCTGCTCCAGCTCCACAGCCCTGG
GACCCCAACTCCTGTCTTCCCTGCTCCTTTCCCTGTGTTCACCCTCAGCTCTGACACATTGAACTGCAG
TTGGGGGGATTGGCAGTTAGCCCTCTGTGCTTCTCCCTGCAGCCCTACCTCTGCCAAGGTCTCTCCCTC
CAGGGACCTCTGCTTCCACCCACATATGTCCACTTAGTCACCCACACTTGACACAGTTCCTGGAGTAC
CCTCTTCCCCCAACCCCAGACCTGCTTTCAGAGCAAAACTCAAGTCCCTCTTCCTCCGTGAAGCTTCTC
CCTCAGCTGAGCAGTGATCACTTACTCACTCTTAACCCCAATCCGCTGACTGGGTGGGGACAGCACGT
CCAGCCTTCCCACCTCTCCTGCAGGCTTCTAGACGGAGTTTCAAAAACTGATGAGCCTCGATCCAGGG
CTTGAAAGAAGCCAGGGTGTAATCTTGTTCATGCATGCGTCCCCAGAGCCTCGCCCAGTGCCTGGCAC
ATAGTAGGCACTCAATAAATGCTGAATGGGTGAATAGTTGAATGATAGGTGCTCAATAAATGAATGA
ATGGCCTTCCCTTCTCAGGCTATTCCCACCATTAGTCTGCCCACCTTTCTAGGCTGGGCTTGGCCACCA
TTAAACACGGGGTGGGGGTGAGGGCCCCTGCAATTCACGGTGCAATATTCACCAGTTTTGCCCTCTGC
CTCATAAAGGCAAACCTGGCTTTTGATTACCATGTGTGGATGTTTCAGTGTCCTTTCTTCTCTGTCCCT
GGGGATGGGGTGGTCTGTGAATATGTGACATTTCTGCAGTTCAGTATCCGAAGGTTTCTCTTGGGGGT
AGGGGCTCCTGGGCGGCCAGATGAATGGGTCCCTGGGAACCCAGACCTCAGATGAGGACTTAATGTC
TTCTTCCTCTCAAGCCAAATTCGCCTCCACCCACTCCCTCTGAAGAACTGGGCATTTGCCAAAGTAACC
ACTGGAGTCATCTAATGGCCCTCCCCCTCCCCAGGTTTCCCACAGCTTTCAGGGACAGTGGGCAAGAG
GACACCCCCCCCCACCACCTCAGTGGAACACACCATTCTCCCCCCCTCAACAGCACACTCAGTGCAGC
AAGACTGACCCCTGACCCCCTCCCAGCCCTCCCTACCTTGGACAGGAAGGAAGTAATGCACCTTCTCT
TGCTGATTATTTATTTGTTTGGAGAGACAGAAATGTAAAAGTGTATCTAGAAATATCTATATCTCTATA
TATTTTTAACTGACTCTTTGGAATCCCCTGGGGTGGGGTGAGGGGTAAGTTTAGGCTTTCGCGGAGGG
GAGGAGACATGGAGCCTGGGAACTCCTTGTTCTCCCCTCTGCTGCCTCTCCCCACCCCTTAAAGCAGTT
GGTAGAAGGAATGGTATTTGTATGGGGGGAGGGAGGCTGGAATGGAGAATCTGGATTCTCTCCTCTTC
CCCATTCTCCAGAGGGAGGGAGGTGGTGAGGAAGAGGAAGGGAGGGGCAGGATGGGCCATGGAGGT
GCCCCACCCCCACACCTGACAATCACCCACACTCCTGGGGCTCTTCCTGGGTCCTGGGGCAGGGCGAG
TCCAAGTGTGAGGCTGTTGATTTGTTTTCAATATTTCTTTTCGTGCTGTATGGTGATGCTTTCTTAGTAT
TCTACACAATAAGAAAAGACAAAGTCCTCGAGATTCTTATGAGTTTTGTTTGAAAACTCTTTCACTAT
ATTTGTTGTAAAGAGGTTTACTATTAAAAGAAAAAGAATACACGTTTCTGATA

[0514] In some embodiments, oligonucleotides may have a region of complementarity to a mouse MEF2D sequence, for example, as provided below (Gene ID: 17261; NCBI Ref. No: NM_001310587.1)

(SEQ ID NO: 666)
TGCGCGGTGCCTACGTCGGCCTCGAGTCTGGGGCTGGAGGAGTTGCCTTTGGAGCCCGAAAGGAGGA
AGGAAGCAAAATATCAACAACCGTCGAGGCGGCTTGGGCGCTCGGCTGCGTGCCTGCCGCCCGCCGC
CGCCGCCCCCGCGCGCACCAGGGGGTCCCGGCCCTGTGGCGCCGCCCAGGCCGCGTGGACGCGGCGC
CTTCGCTGTTTCCCGTCGGAGCTGCGGCTTCGCGTAACCGAGGATTCGGCGGACCGGGCCGAGGCTCC
GGGCGCCGTGACACCCCGTCCCCCCCACGGGCTGGAGGCTGTGCATAGGTGTTCTGCAGACCATGAAC
TGATCACTAGTCCCCAGACATTCATGAGCACAGTGTGAGGCTCCTGATCACCACCCAGCAGCCCCTTC
CTCTCTGGCACTAAGGACCCCCGGAGAAGATGGGGAGGAAAAAGATTCAGATCCAGCGAATCACTGA
TGAACGGAACCGCCAGGTGACCTTCACCAAGCGGAAGTTTGGACTGATGAAGAAGGCCTACGAGCTG
AGTGTGCTGTGCGACTGCGAGATCGCGCTCATCATCTTCAACCACTCCAACAAGCTGTTCCAGTATGC
CAGCACCGACATGGACAAGGTGCTGCTCAAGTACACCGAGTACAACGAGCCACACGAGAGCCGCACC
AATGCTGACATCATCGAGACCCTGAGGAAGAAGGGTTTCAACGGCTGTGACAGCCCAGAGCCGGATG
GGGAGGACTCACTGGAGCAGAGCCCCCTGCTGGAGGACAAGTACCGGCGGGCCAGTGAGGAGCTGG
ATGGGCTCTTCAGGCGCTATGGGTCATCTGTTCCGGCCCCCAACTTTGCCATGCCTGTCACAGTGCCCG
TGTCCAATCAGAGCTCCATGCAGTTCAGCAATCCAAGTAGCTCTCTGGTCACTCCTTCCCTGGTGACAT
CATCCCTTACGGACCCACGGCTCCTGTCCCCCCAGCAGCCAGCACTACAGAGAAACAGTGTTTCTCCA
GGCTTGCCCCAGCGGCCTGCTAGTGCAGGAGCCATGCTGGGTGGAGACCTCAACAGTGCTAATGGAG
CCTGCCCCAGCCCCGTTGGGAATGGCTATGTCAGTGCCCGAGCTTCCCCTGGCCTCCTCCCTGTGGCCA
ATGGCAACAGCCTAAACAAAGTCATCCCTGCCAAGTCTCCGCCCCCACCCACCCACAACACCCAGCTT
GGAGCCCCCAGCCGCAAGCCTGATCTGCGGGTCATCACTTCCCAGGGAGGCAAAGGGTTAATGCATC
ATTTGACTGAGGACCATTTAGATCTGAACAATGCCCAGCGCCTTGGGGTCTCCCAGTCTACCCACTCG
CTCACCACCCCAGTGGTTTCCGTGGCAACACCAAGTTTACTCAGCCAGGGCCTCCCCTTCTCCTCCATG
CCCACTGCCTACAACACAGATTACCAGCTGCCCAGTGCAGAGCTATCCTCCTTACCAGCCTTCAGTTC
ACCTGCAGGGCTGGCACTAGGCAATGTCACCGCCTGGCAGCAGCCCCAGCCGCCCCAGCAGCCACAA
CCGCCACAACCGCCACAGTCACAGCCACAGCCACCACAGCCACAGCCACAGCAGCCACCTCAGCAAC
AGCCCCACTTGGTCCCCGTTTCTCTCAGCAACCTCATCCCTGGCAGCCCCTTGCCTCACGTGGGTGCTG
CTCTCACAGTCACTACCCACCCCCACATCAGCATCAAGTCAGAACCAGTGTCCCCAAGTCGTGAACGC
AGCCCTGCACCTCCTCCACCAGCTGTGTTCCCAGCTGCCCGCCCTGAGCCTGGCGAAGGTCTCAGCAG
CCCAGCTGGAGGATCCTATGAGACCGGGGACCGGGATGATGGACGGGGGGACTTTGGGCCCACACTA
GGCCTGCTGCGCCCAGCCCCAGAGCCTGAGGCTGAGGGCTCAGCTGTGAAGAGGATGCGGCTGGATA
CTTGGACATTAAAGTGATGGTTCCCACTCCCTCCTTTCAGCCTCCCTGATGAAGAGTTGACAATCTCAC
CGCCCACCCCCTCCTTATCCTGGGCTCCTCCCGCTCGACCCCACTTCCTTTCTTCTGCTCCATGTCCTGT
TGATGGTTACATTTGTGTATAATTATATTATTATTATTGTTATTATTATTATTATATTTTTAAATTCGAA
TTCTCGCTTTAGAGAGAGGGATGCTCTTGCCCCTTTCTTGCCCCCACCATTTTCACTGATGGGGACTCT
CTTTATTGCGGGAAAGGGGGGACACTTTGCACGTTGTACACATATGCTGCAGGAAGGAGGGAGGCGG
TAGGCCTTGGAGAAGGACAGGTGCCGAGCCCTGCATGTGGAGCCCTCCCATCCCATTCCCAGATAGAC
GTAAAGAACCAAAAACTACCCAACAACAAAACCCAGATAGTGGACTGAAACCCAAAGCTGGCTTGAC
GATGGGCTTGTGTCTCAGGGGATAGGAGGAGGCAGTTTCTGCTTCTGGGCTGTTCACGGCTAATACCC
ATCCTGGTCCCTCCAGCTTCCTGCATACGTATCACACTCTCTGATCCTGTGTGTTACACCCCAAGATCT
GGGTGATAGAAAGGCTGCCTAGGAATCTGAGGCCAGGGAAGGGGCTTGAGGTTGGAATCTCTAGAGA
TAACATGGAGAGAGACAGCTGTAGAAAGAGGGCTGATGAGGACAGAAGGACTGGGTGTGGTGAATT
GGGACCCTACCCCCAGCTTTTCCTTTGAGATGTACAGTGCAATAGCTCCCCGTCCTTTAGCCTACCCCA
ATCCTAAAGAAAGCTGGCCATGTACTGGGAGATTTGGGAGAGGACCTTCATTGAAGTGGCTCCAGGA
TGGGCCAGAGTCGTCCTTTGGTTCCCTGGGGCACTGAGAGCAGGAGGCTTGTCAGGGGCAGGGTGAG
GAGGGCACCTCTTGGCTTTGTGCACCTGTGTCCAGAAGAGTACTTACTGGGCACATGGAGGCTCCTGT
AGATGAGGCCCGGGCCCTTCCCCAGGCCTCTGAGCTCCTGCCCCTGACCCACCTCCCAGCTCTCTGCG
TGCTCCTTGTCTCGCTACCTCCTGTCCCTCCACCTCCAGGCCACATCCCAAACCTGCCCTCTTGCTACT
GTAATTGTAAATAGAGACCTTTCAAATGTTAGTGGTGTAACCGTCCAGGAAACTGTTGTGTTTGTTGTT
GTTGTATTGATATGAAATGAGATTCTATTTTTGTCAAAGTATATTGTAATAATAATGACTCAAATGGCC
CGTACTGTACAGATGAGATTCTTCTGCTGTGTTCTTGCCTTCCTCTCCAGACTAATGCTTTGTTGCCTCC
TCAGTGGGGCTGCAGCAAGCACCAGGGGCAGTGGAAGAAGCATTGGGTCCTTGGACCTCTTGCTGGA
TCTGAGGTCAGACTGGAGGGAATAGTTTGCCCCCTCCCCAGCCTGCTGTCACCACCCCTGCCCTTCCTC
TGCTTCCCCACCTGGGGAAAGGGGATGGGAGACAGCACACACTCCCTTGGAGTTCCTCCCAGCTGGA
GGGTAGAGTTAGACAAGGCTCAGTGTTGTAGTACGATGGTCTTTGCCCACCTGTGACCCAGCCTTTTG
TAGTATTTTGACACTTGATGCAGGGAAGGAGCCAGAAGCAGAGGGGTGTGAGCATGCTCGTGGAGGC
GTATCTGGGTTCACCCTGTATTTATGTGTTTGTGTGCAGCTGTGCGGATGTACCTTTGAGTGACTCAAG
CTCCAAGGGCCTCTGTGTGAGCTGGGTGTGTTTACAAGGGATCAGCGCCTTCCAACTCTGTGGCTTCA
CCCCCTCCCCGGGCTGCTCTCAGTCCCAAAACATTTTACTAAAGTCATGGGGGACGGGTGCTAGTTGG
CCTTCCTGTTTCTCCCCACAGCCTACCTCCACCAGGGCTTCACATTTGGAGCTCTGCCTCCATATGGCT
GTCCACTAGCCCCACCCAGGCATGGTTCATCCCTGGAGTTCTGACTTGTTTATGGAGCCAACTCAAGTT
CTTCTTGCCCGGAGCTTTGCCTTTTGTAAGGCAGGGACCCTCCCTTAACCAGAGTTTACCCCAGTAGCT
GACCAAGCATGGGGTGCTACCCACATGCCTCACCTTCCCACTCCTCCTCACAAGTCCTGGAGGGAGTT
TTAAGACTTGCTTATGGCCTTGAAAGAAGCCAGGGTTGTAGCCCTGTGCTCCCCTTGAAGTAGCTGGC
ACATTGTAGGCCCTCAGTAAATGCTGAATGGGTGGATGACAGGTGCTCAATAAATGTGGATTCACGGC
CTCATCTCAGGCCCATCCTTCAAGGCTGAGCTTGGCCACCATTACAGTTGTGGGTGAAGCCCCTATAG
TTCACAGTGTGCTACTCAACAGTTTGCCATCTGCTTCCCGAAAGCAAACCTGGCTTGTGATTGCCATGT
ACGGATGCGTGCATGCACTGTGTGTGTGTGTGCGTGCGTGTGCGTGTCTGTGTCTGCACACACACGTA
TGAGTTCTTGTGTGTCTCTGTCCCTGACTGAAGGGGCAGTCTGTGAATGAGTATGTGACATTTCTGCAG
TTTAGTATCCCCAGGTTTCTCCTGGGGCTATGCAGGGGCTTCTGGCTGGCCAGGTAAATGGATCCCTG
GGAACCTAGACCTCAAATGGGGACTTATTTTCTTCCTCTCACAAGCCAAATTTGCCTACTCTCCACTCC
CTATACAGAACTGGGTATTTGCCAAAGTAGCCTCTGGCGTCATCCAGTGCCCTTCCCACCCAGGTTCC
CCTCTGCTTTCAGGGATAGTGGGACCGAGGGCCACCCCCACATGCCTCAGTTTAGCACATTTCCTCCA
TCCCCAGCAGTGCATCCACCCACCCTCCCCAACTCCAACAGGAAGGAAGAAAGAAATGCACCTTCTCT
TGCTCGTTATTTATTTGTTTGGAGAGACAGAAATGATGGAAAAGTATCTAAATCTATCTCTCTCTCTAT
TTTTACCTAACTCTCTGGAACCCCTGTGGGGGAATGTAGGCTCTCCTAAGAGGCTGGGAGCTCCTTGTT
CTACCCTGTCTGCCTCTACATAAGCAGAAGGGGTGGGATGTAATGGGGCAGGAGGGCTGAGATTCCC
AAGGAGAATCTGAATTCTCTACCCCCATTCAAGTCCCAGAAAGAGGGAAGAAGGGAGGGATGGGCCA
GCCAAGAGCTGACCCGTCCCCAAACTTGACAATCACCCACACTCCTGGCTCCTGGGTCTGGGTGAGTC
CAAGTGTGTGGCTGTTGGTTTGTTTTCATTATTTCTTTCCGTGCTGTACGGTGATGCTTTCTAGTATTCT
GCACATTAAGAAAAGTCCTCGAGATTCTTACGAGTTTGGTTTGAAAACTCTTTCACTATATTTGTTGTA
AAGAGGTTTACTATTAAAAGAAAAAAAAAAAAACATGTTTCTGATACCTCAAAAAAAAAAAAAAAA
AA.

[0515] In some embodiments, oligonucleotides may have a region of complementarity to a mouse MEF2D sequence, for example, as provided below (Gene ID: 17261; NCBI Ref. No: NM_133665.4)

(SEQ ID NO: 667)
TGCGCGGTGCCTACGTCGGCCTCGAGTCTGGGGCTGGAGGAGTTGCCTTTGGAGCCCGAAAGGAGGA
AGGAAGCAAAATATCAACAACCGTCGAGGCGGCTTGGGCGCTCGGCTGCGTGCCTGCCGCCCGCCGC
CGCCGCCCCCGCGCGCACCAGGGGGTCCCGGCCCTGTGGCGCCGCCCAGGCCGCGTGGACGCGGCGC
CTTCGCTGTTTCCCGTCGGAGCTGCGGCTTCGCGTAACCGAGGATTCGGCGGACCGGGCCGAGGCTCC
GGGCGCCGTGACACCCCGTCCCCCCCACGGGCTGGAGGCTGTGCATAGGTGTTCTGCAGACCATGAAC
TGATCACTAGTCCCCAGACATTCATGAGCACAGTGTGAGGCTCCTGATCACCACCCAGCAGCCCCTTC
CTCTCTGGCACTAAGGACCCCCGGAGAAGATGGGGAGGAAAAAGATTCAGATCCAGCGAATCACTGA
TGAACGGAACCGCCAGGTGACCTTCACCAAGCGGAAGTTTGGACTGATGAAGAAGGCCTACGAGCTG
AGTGTGCTGTGCGACTGCGAGATCGCGCTCATCATCTTCAACCACTCCAACAAGCTGTTCCAGTATGC
CAGCACCGACATGGACAAGGTGCTGCTCAAGTACACCGAGTACAACGAGCCACACGAGAGCCGCACC
AATGCTGACATCATCGAGACCCTGAGGAAGAAGGGTTTCAACGGCTGTGACAGCCCAGAGCCGGATG
GGGAGGACTCACTGGAGCAGAGCCCCCTGCTGGAGGACAAGTACCGGCGGGCCAGTGAGGAGCTGG
ATGGGCTCTTCAGGCGCTATGGGTCATCTGTTCCGGCCCCCAACTTTGCCATGCCTGTCACAGTGCCCG
TGTCCAATCAGAGCTCCATGCAGTTCAGCAATCCAAGTAGCTCTCTGGTCACTCCTTCCCTGGTGACAT
CATCCCTTACGGACCCACGGCTCCTGTCCCCCCAGCAGCCAGCACTACAGAGAAACAGTGTTTCTCCA
GGCTTGCCCCAGCGGCCTGCTAGTGCAGGAGCCATGCTGGGTGGAGACCTCAACAGTGCTAATGGAG
CCTGCCCCAGCCCCGTTGGGAATGGCTATGTCAGTGCCCGAGCTTCCCCTGGCCTCCTCCCTGTGGCCA
ATGGCAACAGCCTAAACAAAGTCATCCCTGCCAAGTCTCCGCCCCCACCCACCCACAACACCCAGCTT
GGAGCCCCCAGCCGCAAGCCTGATCTGCGGGTCATCACTTCCCAGGGAGGCAAAGGGTTAATGCATC
ATTTGAACAATGCCCAGCGCCTTGGGGTCTCCCAGTCTACCCACTCGCTCACCACCCCAGTGGTTTCCG
TGGCAACACCAAGTTTACTCAGCCAGGGCCTCCCCTTCTCCTCCATGCCCACTGCCTACAACACAGAT
TACCAGCTGCCCAGTGCAGAGCTATCCTCCTTACCAGCCTTCAGTTCACCTGCAGGGCTGGCACTAGG
CAATGTCACCGCCTGGCAGCAGCCCCAGCCGCCCCAGCAGCCACAACCGCCACAACCGCCACAGTCA
CAGCCACAGCCACCACAGCCACAGCCACAGCAGCCACCTCAGCAACAGCCCCACTTGGTCCCCGTTTC
TCTCAGCAACCTCATCCCTGGCAGCCCCTTGCCTCACGTGGGTGCTGCTCTCACAGTCACTACCCACCC
CCACATCAGCATCAAGTCAGAACCAGTGTCCCCAAGTCGTGAACGCAGCCCTGCACCTCCTCCACCAG
CTGTGTTCCCAGCTGCCCGCCCTGAGCCTGGCGAAGGTCTCAGCAGCCCAGCTGGAGGATCCTATGAG
ACCGGGGACCGGGATGATGGACGGGGGGACTTTGGGCCCACACTAGGCCTGCTGCGCCCAGCCCCAG
AGCCTGAGGCTGAGGGCTCAGCTGTGAAGAGGATGCGGCTGGATACTTGGACATTAAAGTGATGGTT
CCCACTCCCTCCTTTCAGCCTCCCTGATGAAGAGTTGACAATCTCACCGCCCACCCCCTCCTTATCCTG
GGCTCCTCCCGCTCGACCCCACTTCCTTTCTTCTGCTCCATGTCCTGTTGATGGTTACATTTGTGTATAA
TTATATTATTATTATTGTTATTATTATTATTATATTTTTAAATTCGAATTCTCGCTTTAGAGAGAGGGAT
GCTCTTGCCCCTTTCTTGCCCCCACCATTTTCACTGATGGGGACTCTCTTTATTGCGGGAAAGGGGGGA
CACTTTGCACGTTGTACACATATGCTGCAGGAAGGAGGGAGGCGGTAGGCCTTGGAGAAGGACAGGT
GCCGAGCCCTGCATGTGGAGCCCTCCCATCCCATTCCCAGATAGACGTAAAGAACCAAAAACTACCC
AACAACAAAACCCAGATAGTGGACTGAAACCCAAAGCTGGCTTGACGATGGGCTTGTGTCTCAGGGG
ATAGGAGGAGGCAGTTTCTGCTTCTGGGCTGTTCACGGCTAATACCCATCCTGGTCCCTCCAGCTTCCT
GCATACGTATCACACTCTCTGATCCTGTGTGTTACACCCCAAGATCTGGGTGATAGAAAGGCTGCCTA
GGAATCTGAGGCCAGGGAAGGGGCTTGAGGTTGGAATCTCTAGAGATAACATGGAGAGAGACAGCTG
TAGAAAGAGGGCTGATGAGGACAGAAGGACTGGGTGTGGTGAATTGGGACCCTACCCCCAGCTTTTC
CTTTGAGATGTACAGTGCAATAGCTCCCCGTCCTTTAGCCTACCCCAATCCTAAAGAAAGCTGGCCAT
GTACTGGGAGATTTGGGAGAGGACCTTCATTGAAGTGGCTCCAGGATGGGCCAGAGTCGTCCTTTGGT
TCCCTGGGGCACTGAGAGCAGGAGGCTTGTCAGGGGCAGGGTGAGGAGGGCACCTCTTGGCTTTGTG
CACCTGTGTCCAGAAGAGTACTTACTGGGCACATGGAGGCTCCTGTAGATGAGGCCCGGGCCCTTCCC
CAGGCCTCTGAGCTCCTGCCCCTGACCCACCTCCCAGCTCTCTGCGTGCTCCTTGTCTCGCTACCTCCT
GTCCCTCCACCTCCAGGCCACATCCCAAACCTGCCCTCTTGCTACTGTAATTGTAAATAGAGACCTTTC
AAATGTTAGTGGTGTAACCGTCCAGGAAACTGTTGTGTTTGTTGTTGTTGTATTGATATGAAATGAGAT
TCTATTTTTGTCAAAGTATATTGTAATAATAATGACTCAAATGGCCCGTACTGTACAGATGAGATTCTT
CTGCTGTGTTCTTGCCTTCCTCTCCAGACTAATGCTTTGTTGCCTCCTCAGTGGGGCTGCAGCAAGCAC
CAGGGGCAGTGGAAGAAGCATTGGGTCCTTGGACCTCTTGCTGGATCTGAGGTCAGACTGGAGGGAA
TAGTTTGCCCCCTCCCCAGCCTGCTGTCACCACCCCTGCCCTTCCTCTGCTTCCCCACCTGGGGAAAGG
GGATGGGAGACAGCACACACTCCCTTGGAGTTCCTCCCAGCTGGAGGGTAGAGTTAGACAAGGCTCA
GTGTTGTAGTACGATGGTCTTTGCCCACCTGTGACCCAGCCTTTTGTAGTATTTTGACACTTGATGCAG
GGAAGGAGCCAGAAGCAGAGGGGTGTGAGCATGCTCGTGGAGGCGTATCTGGGTTCACCCTGTATTT
ATGTGTTTGTGTGCAGCTGTGCGGATGTACCTTTGAGTGACTCAAGCTCCAAGGGCCTCTGTGTGAGC
TGGGTGTGTTTACAAGGGATCAGCGCCTTCCAACTCTGTGGCTTCACCCCCTCCCCGGGCTGCTCTCAG
TCCCAAAACATTTTACTAAAGTCATGGGGGACGGGTGCTAGTTGGCCTTCCTGTTTCTCCCCACAGCCT
ACCTCCACCAGGGCTTCACATTTGGAGCTCTGCCTCCATATGGCTGTCCACTAGCCCCACCCAGGCAT
GGTTCATCCCTGGAGTTCTGACTTGTTTATGGAGCCAACTCAAGTTCTTCTTGCCCGGAGCTTTGCCTT
TTGTAAGGCAGGGACCCTCCCTTAACCAGAGTTTACCCCAGTAGCTGACCAAGCATGGGGTGCTACCC
ACATGCCTCACCTTCCCACTCCTCCTCACAAGTCCTGGAGGGAGTTTTAAGACTTGCTTATGGCCTTGA
AAGAAGCCAGGGTTGTAGCCCTGTGCTCCCCTTGAAGTAGCTGGCACATTGTAGGCCCTCAGTAAATG
CTGAATGGGTGGATGACAGGTGCTCAATAAATGTGGATTCACGGCCTCATCTCAGGCCCATCCTTCAA
GGCTGAGCTTGGCCACCATTACAGTTGTGGGTGAAGCCCCTATAGTTCACAGTGTGCTACTCAACAGT
TTGCCATCTGCTTCCCGAAAGCAAACCTGGCTTGTGATTGCCATGTACGGATGCGTGCATGCACTGTG
TGTGTGTGTGCGTGCGTGTGCGTGTCTGTGTCTGCACACACACGTATGAGTTCTTGTGTGTCTCTGTCC
CTGACTGAAGGGGCAGTCTGTGAATGAGTATGTGACATTTCTGCAGTTTAGTATCCCCAGGTTTCTCCT
GGGGCTATGCAGGGGCTTCTGGCTGGCCAGGTAAATGGATCCCTGGGAACCTAGACCTCAAATGGGG
ACTTATTTTCTTCCTCTCACAAGCCAAATTTGCCTACTCTCCACTCCCTATACAGAACTGGGTATTTGC
CAAAGTAGCCTCTGGCGTCATCCAGTGCCCTTCCCACCCAGGTTCCCCTCTGCTTTCAGGGATAGTGG
GACCGAGGGCCACCCCCACATGCCTCAGTTTAGCACATTTCCTCCATCCCCAGCAGTGCATCCACCCA
CCCTCCCCAACTCCAACAGGAAGGAAGAAAGAAATGCACCTTCTCTTGCTCGTTATTTATTTGTTTGG
AGAGACAGAAATGATGGAAAAGTATCTAAATCTATCTCTCTCTCTATTTTTACCTAACTCTCTGGAACC
CCTGTGGGGGAATGTAGGCTCTCCTAAGAGGCTGGGAGCTCCTTGTTCTACCCTGTCTGCCTCTACATA
AGCAGAAGGGGTGGGATGTAATGGGGCAGGAGGGCTGAGATTCCCAAGGAGAATCTGAATTCTCTAC
CCCCATTCAAGTCCCAGAAAGAGGGAAGAAGGGAGGGATGGGCCAGCCAAGAGCTGACCCGTCCCC
AAACTTGACAATCACCCACACTCCTGGCTCCTGGGTCTGGGTGAGTCCAAGTGTGTGGCTGTTGGTTT
GTTTTCATTATTTCTTTCCGTGCTGTACGGTGATGCTTTCTAGTATTCTGCACATTAAGAAAAGTCCTCG
AGATTCTTACGAGTTTGGTTTGAAAACTCTTTCACTATATTTGTTGTAAAGAGGTTTACTATTAAAAGA
AAAAAAAAAAAACATGTTTCTGATACCTCAAAAAAAAAAAAAAAAAA

[0516] In some embodiments, the oligonucleotide may have region of complementarity to an isoform of MEF2D, for example as reported in Martin et al., Mol Cell Biol., March 1994, p. 1647-1656, the contents of which are incorporated herein by reference in its entirety.

[0517] In some embodiments, an oligonucleotide comprises a region of complementarity to a MEF2D sequence as set forth in any one of SEQ ID NOs: 664-667. In some embodiments, the oligonucleotide comprises a region of complementarity that is at least 80%, 85%, 90%, 95%, 96%, 97%, 98%, 99%, or 100% complementary to a MEF2D sequence as set forth in any one of SEQ ID NOs: 664-667. In some embodiments, the oligonucleotide comprises a sequence that has at least 10, 11, 12, 13, 14, 15, 16, 17, 18, or 19 consecutive nucleotides that are perfectly complementary to a MEF2D sequence as set forth in any one of SEQ ID NOs: 664-667. In some embodiments, an oligonucleotide may comprise a sequence that targets (e.g., is complementary to) an RNA version (i.e., wherein the T's are replaced with U's) of a MEF2D sequence as set forth in any one of SEQ ID NOs: 664-667. In some embodiments, the oligonucleotide comprises a sequence that is complementary (e.g., at least 80%, 85%, 90%, 95%, 96%, 97%, 98%, 99%, or 100% complementary) to an RNA version of a MEF2D sequence as set forth in any one of SEQ ID NOs: 664-667. In some embodiments, the oligonucleotide comprises a sequence that has at least 10, 11, 12, 13, 14, 15, 16, 17, 18, or 19 consecutive nucleotides that are perfectly complementary to an RNA version of a MEF2D sequence as set forth in any one of SEQ ID NOs: 664-667.

[0518] In some embodiments, a MEF2D-targeting oligonucleotide comprises an antisense strand that comprises at least 10, 11, 12, 13, 14, 15, 16, 17, 18, or 19 consecutive nucleotides of a sequence comprising any one of SEQ ID NOs: 716-223. In some embodiments, a MEF2D-targeting oligonucleotide comprises an antisense strand that comprises any one of SEQ ID NOs: 716-223. In some embodiments, a MEF2D-targeting oligonucleotide comprises an antisense strand that comprises shares at least 70%, 75%, 80%, 85%, 90%, 95%, or 97% sequence identity with at least 12 or at least 15 consecutive nucleotides of any one SEQ ID NOs: 716-223.

[0519] In some embodiments, a MEF2D-targeting oligonucleotide comprises an antisense strand that targets a MEF2D sequence comprising any one of SEQ ID NOs: 668-715. In some embodiments, an oligonucleotide comprises an antisense strand comprising at least 10, 11, 12, 13, 14, 15, 16, 17, 18, or 19 nucleotides (e.g., consecutive nucleotides) that are complementary to a MEF2D sequence comprising any one of SEQ ID NOs: 668-715. In some embodiments, a MEF2D-targeting oligonucleotide comprises an antisense strand comprising a sequence that is at least 70%, 75%, 80%, 85%, 90%, 95%, or 97% complementary with at least 12 or at least 15 consecutive nucleotides of any one of SEQ ID NOs: 668-715.

[0520] In some embodiments, a MEF2D-targeting oligonucleotide comprises an antisense strand comprises a region of complementarity to a target sequence as set forth in any one of SEQ ID NOs: 668-715. In some embodiments, the region of complementarity is at least 8, at least 9, at least 10, at least 11, at least 12, at least 13, at least 14, at least 15, at least 16, at least 17, or at least 19 nucleotides in length. In some embodiments, the region of complementarity is 8, 9, 10, 11, 12, 13, 14, 15, 16, 17, 18, or 19 nucleotides in length. In some embodiments, the region of complementarity is in the range of 8 to 20, 10 to 20 or 15 to 20 nucleotides in length. In some embodiments, the region of complementarity is fully complementary with all or a portion of its target sequence. In some embodiments, the region of complementarity includes 1, 2, 3 or more mismatches.

[0521] In some embodiments, a MEF2D-targeting oligonucleotide further comprises a sense strand that hybridizes to the antisense strand to form a double stranded siRNA. In some embodiments, the MEF2D-targeting oligonucleotide comprises an antisense strand that comprises the nucleotide sequence of any one of SEQ ID NOs: 716-223. In some embodiments, the MEF2D-targeting oligonucleotide further comprises a sense strand that comprises the nucleotide sequence of any one of SEQ ID NOs: 692-715.

[0522] In some embodiments, the MEF2D-targeing oligonucleotide is a double stranded oligonucleotide (e.g., an siRNA) comprising an antisense strand that comprises the nucleotide sequence of any one of SEQ ID NOs: 716-223 and a sense strand that hybridizes to the antisense strand and comprises the nucleotide sequence of any one of SEQ ID NOs: 692-715, wherein the antisense strand and/or (e.g., and) comprises one or more modified nucleosides (e.g., 2′-modified nucleosides). In some embodiment, the one or more modified nucleosides are selected from 2′-O-Me and 2′-F modified nucleosides.

[0523] In some embodiments, the MEF2D-targeing oligonucleotide is a double stranded oligonucleotide (e.g., an siRNA) comprising an antisense strand that comprises the nucleotide sequence of any one of SEQ ID NOs: 716-223 and a sense strand that hybridizes to the antisense strand and comprises the nucleotide sequence of any one of SEQ ID NOs: 692-715, wherein the each nucleoside in the antisense strand and/or (e.g., and) each nucleoside in the sense strand is a 2′-modified nucleoside selected from 2′-O-Me and 2′-F modified nucleosides.

[0524] In some embodiments, the MEF2D-targeing oligonucleotide is a double stranded oligonucleotide (e.g., an siRNA) comprising an antisense strand that comprises the nucleotide sequence of any one of SEQ ID NOs: 716-223 and a sense strand that hybridizes to the antisense strand and comprises the nucleotide sequence of any one of SEQ ID NOs: 692-715, wherein the each nucleoside in the antisense strand and each nucleoside in the sense strand is a 2′-modified nucleoside selected from 2′-O-Me and 2′-F modified nucleosides, and wherein the antisense strand and/or (e.g., and) the sense strand each comprises one or more phosphorothioate internucleoside linkages. In some embodiments, the sense strand does not comprise any phosphorothioate internucleoside linkages (all the internucleoside linkages in the sense strand are phosphodiester internucleoside linkages), and the antisense strand comprises 1, 2, or 3 phosphorothioate internucleoside linkages. In some embodiments, the antisense strand comprises 2 phosphorothioate internucleoside linkages, optionally wherein the two internucleoside linkages at the 3′ end of the antisense strand are phosphorothioate internucleoside linkages and the rest of the internucleoside linkages in the antisense strand are phosphodiester internucleoside linkages,

[0525] In some embodiments, the antisense strand of the MEF2D-targeing oligonucleotide comprises a structure of (5′ to 3′): fNfNmNfNmNfNmNfNmNfNmNfNmNfNmNfNmNfNmNfNmN*fN*mN, wherein “mN” indicates 2′-O-methyl (2′-O-Me) modified nucleosides; “fN” indicates 2′-fluoro (2′-F) modified nucleosides; “*” indicates phosphrothioate internucleoside linkage; and the absence of between two nucleosides indicate phosphodiester internucleoside linkage.

[0526] In some embodiments, the sense strand of the MEF2D)-targeing oligonucleotide comprises a structure of (5′ to 3′): mNmNfNmNfNmNfNmNfNmNfNmNfNmNfNmNfNmNfNmNfN, wherein “mN” indicates 2′-O-methyl (2′-O-Me) modified nucleosides; “fN” indicates 2′-fluoro (2′-F) modified nucleosides; and the absence of “*” between two nucleosides indicate phosphodiester internucleoside linkage.

[0527] In some embodiments, the antisense strand of the MEF2D)-targeing oligonucleotide is selected from the modified version of SEQ ID NOs: 716-223 listed in Table 28. In some embodiments, the sense strand of the MEF2D)-targeing oligonucleotide is selected from the modified version of SEQ ID NOs: 692-715 listed in Table 28. In some embodiments, the MEF2D)-targeing oligonucleotide is a siRNA selected from the siRNAs listed in Table 28.

TABLE 26
MEF2D Target Sequences

| | Corresponding | MEF2D Target | |
|---|---|---|---|
| Reference | nucleotides of the | Sequence | SEQ ID |
| sequence | Reference Sequence | (5’ to 3’) | NO: |
| NM_005920.4 | 445-463 | TTCAGATCCAGCGAATCAC | 668 |
| (SEQ ID NO: 664) | | | |
| NM_005920.4 | 616-634 | ACAAGGTGCTGCTCAAGTA | 669 |
| (SEQ ID NO: 664) | | | |
| NM_005920.4 | 1423-1441 | CCTACAACACAGATTACCA | 670 |
| (SEQ ID NO: 664) | | | |
| NM_005920.4 | 2027-2045 | ATGAAGAGTTGACAATCTC | 671 |
| (SEQ ID NO: 664) | | | |
| NM_005920.4 | 2280-2298 | ACACTTTGCACGTTGTACA | 672 |
| (SEQ ID NO: 664) | | | |
| NM_005920.4 | 2289-2307 | ACGTTGTACACATATGCTG | 673 |
| (SEQ ID NO: 664) | | | |
| NM_005920.4 | 2355-2373 | GCCGAGCCCTGCATGTGGA | 674 |
| (SEQ ID NO: 664) | | | |
| NM_005920.4 | 3385-3403 | ATATTGTAATAATAATGAC | 675 |
| (SEQ ID NO: 664) | | | |
| NM_005920.4 | 3387-3406 | ATTGTAATAATAATGACTC | 676 |
| (SEQ ID NO: 664) | | | |
| NM_005920.4 | 3349-3367 | TATTGATATGAAATGAGAT | 677 |
| (SEQ ID NO: 664) | | | |
| NM_005920.4 | 3376-3394 | TGTCAAAGTATATTGTAAT | 678 |
| (SEQ ID NO: 664) | | | |
| NM_005920.4 | 3375-3393 | TTGTCAAAGTATATTGTAA | 679 |
| (SEQ ID NO: 664) | | | |
| NM_005920.4 | 3341-3359 | TGTTGTTGTATTGATATGA | 680 |
| (SEQ ID NO: 664) | | | |
| NM_005920.4 | 1147-1165 | GCAACAGCCTAAACAAGGT | 681 |
| (SEQ ID NO: 664) | | | |
| NM_005920.4 | 1428-1446 | AACACAGATTACCAGTTGA | 682 |
| (SEQ ID NO: 664) | | | |
| NM_005920.4 | 2461-2479 | TGGGCTTGATGGGTGGGTT | 683 |
| (SEQ ID NO: 664) | | | |
| NM_005920.4 | 2840-2858 | CTAAGATATACAGTGCAAT | 684 |
| (SEQ ID NO: 664) | | | |
| NM_005920.4 | 2844-2862 | GATATACAGTGCAATAGCT | 685 |
| (SEQ ID NO: 664) | | | |
| NM_005920.4 | 2924-2942 | AGAGGGTCTTCAGTGAGGT | 686 |
| (SEQ ID NO: 664) | | | |
| NM_005920.4 | 613-625 | CCGACATGGACAAGGTGCT | 687 |
| (SEQ ID NO: 664) | | | |
| NM_133665.4 | 894-912 | ATGCAGTTCAGCAATCCAA | 688 |
| (SEQ ID NO: 667) | | | |
| NM_133665.4 | 902-920 | CAGCAATCCAAGTAGCTCT | 689 |
| (SEQ ID NO: 667) | | | |
| NM_001310587.1 | 1377-1395 | GCAACACCAAGTTTACTCA | 690 |
| (SEQ ID NO: 666) | | | |
| NM_001310587.1 | 1955-1973 | GCTGGATACTTGGACATTA | 691 |
| (SEQ ID NO: 666) | | | |

*The target sequences contain Ts, but binding to RNA and/or DNA is contemplated.

[0528] In some embodiments, an oligonucleotide may comprise or consist of any sequence as provided in Table 27.

TABLE 27
Oligonucleotide sequences for targeting MEF2D

| Passenger Strand/ | | Guide Strand/ | |
|---|---|---|---|
| Sense Strand | SEQ ID | Antisense Strand | SEQ ID |
| (RNA) (5’ to 3’) | NO: | (RNA) (5’ to 3’) | NO: |
| GAUUCAGAUCCAGCGAAUCAC | 692 | GUGAUUCGCUGGAUCUGAAUCUU | 716 |
| GGACAAGGUGCUGCUCAAGUA | 693 | UACUUGAGCAGCACCUUGUCCAU | 717 |
| UGCCUACAACACAGAUUACCA | 694 | UGGUAAUCUGUGUUGUAGGCAGU | 718 |
| UGAUGAAGAGUUGACAAUCUC | 695 | GAGAUUGUCAACUCUUCAUCAGG | 719 |
| GGACACUUUGCACGUUGUACA | 696 | UGUACAACGUGCAAAGUGUCCCC | 720 |
| GCACGUUGUACACAUAUGCUG | 697 | CAGCAUAUGUGUACAACGUGCAA | 721 |
| GUGCCGAGCCCUGCAUGUGGA | 698 | UCCACAUGCAGGGCUCGGCACCU | 722 |
| GUAUAUUGUAAUAAUAAUGAC | 699 | GUCAUUAUUAUUACAAUAUACUU | 723 |
| AUAUUGUAAUAAUAAUGACUC | 700 | GAGUCAUUAUUAUUACAAUAUAC | 724 |
| UGUAUUGAUAUGAAAUGAGAU | 701 | AUCUCAUUUCAUAUCAAUACAAC | 725 |
| UUUGUCAAAGUAUAUUGUAAU | 702 | AUUACAAUAUACUUUGACAAAAA | 726 |
| UUUUGUCAAAGUAUAUUGUAA | 703 | UUACAAUAUACUUUGACAAAAAU | 727 |
| GUUGUUGUUGUAUUGAUAUGA | 704 | UCAUAUCAAUACAACAACAACAA | 728 |
| UGGCAACAGCCUAAACAAGGU | 705 | ACCUUGUUUAGGCUGUUGCCAUU | 729 |
| ACAACACAGAUUACCAGUUGA | 706 | UCAACUGGUAAUCUGUGUUGUAG | 730 |
| AGUGGGCUUGAUGGGUGGGUU | 707 | AACCCACCCAUCAAGCCCACUUU | 731 |
| CUCUAAGAUAUACAGUGCAAU | 708 | AUUGCACUGUAUAUCUUAGAGAA | 732 |
| AAGAUAUACAGUGCAAUAGCU | 709 | AGCUAUUGCACUGUAUAUCUUAG | 733 |
| GGAGAGGGUCUUCAGUGAGGU | 710 | ACCUCACUGAAGACCCUCUCCCC | 734 |
| CACCGACAUGGACAAGGUGCU | 711 | AGCACCUUGUCCAUGUCGGUGCU | 735 |
| CCAUGCAGUUCAGCAAUCCAA | 712 | UUGGAUUGCUGAACUGCAUGGAG | 736 |
| UUCAGCAAUCCAAGUAGCUCU | 713 | AGAGCUACUUGGAUUGCUGAACU | 737 |
| UGGCAACACCAAGUUUACUCA | 714 | UGAGUAAACUUGGUGUUGCCACG | 738 |
| CGGCUGGAUACUUGGACAUUA | 715 | UAAUGUCCAAGUAUCCAGCCGCA | 739 |

[0529] In some embodiments, an oligonucleotide is a modified oligonucleotide as provided in Table 28, wherein ‘mN’ represents a 2′-O-methyl modified nucleoside (e.g., mU is 2′-O-methyl modified uridine), ‘fN’ represents a 2′-fluoro modified nucleoside (e.g., fU is 2′-fluoro modified uridine), ‘*’ represents a phosphorothioate internucleoside linkage, and lack of “*” between nucleosides indicate phosphodiester internucleoside linkage.

TABLE 28
Modified Oligonucleotides for targeting MEF2D

| | Modified Passenger | | Modified Guide | |
|---|---|---|---|---|
| | Strand/Sense Strand | SEQ | Strand/Antisense Strand | SEQ |
| siRNA # | (RNA) (5’ to 3’) | ID NO: | (RNA) (5’ to 3’) | ID NO: |
| hsMEF2D-1 | mGmAfUmUfCmAfGmAfU | 692 | fGfUmGfAmUfUmCfGm | 716 |
| | mCfCmAfGmCfGmAfAmUf | | CfUmGfGmAfUmCfUm | |
| | CmAfC | | GfAmAfUmC*fU*mU | |
| hsMEF2D-2 | mGmGfAmCfAmAfGmGfU | 693 | fUfAmCfUmUfGmAfGm | 717 |
| | mGfCmUfGmCfUmCfAmAf | | CfAmGfCmAfCmCfUm | |
| | GmUfA | | UfGmUfCmC*fA*mU | |
| hsMEF2D-3 | mUmGfCmCfUmAfCmAfAm | 694 | fUfGmGfUmAfAmUfCm | 718 |
| | CfAmCfAmGfAmUfUmAfC | | UfGmUfGmUfUmGfUm | |
| | mCfA | | AfGmGfCmA*fG*mU | |
| hsMEF2D-4 | mUmGfAmUfGmAfAmGfA | 695 | fGfAmGfAmUfUmGfUm | 719 |
| | mGfUmUfGmAfCmAfAmUf | | CfAmAfCmUfCmUfUm | |
| | CmUfC | | CfAmUfCmA*fG*mG | |
| hsMEF2D-5 | mGmGfAmCfAmCfUmUfUm | 696 | fUfGmUfAmCfAmAfCm | 720 |
| | GfCmAfCmGfUmUfGmUfA | | GfUmGfCmAfAmAfGm | |
| | mCfA | | UfGmUfCmC*fC*mC | |
| hsMEF2D-6 | mGmCfAmCfGmUfUmGfUm | 697 | fCfAmGfCmAfUmAfUm | 721 |
| | AfCmAfCmAfUmAfUmGfC | | GfUmGfUmAfCmAfAm | |
| | mUfG | | CfGmUfGmC*fA*mA | |
| hsMEF2D-7 | mGmUfGmCfCmGfAmGfCm | 698 | fUfCmCfAmCfAmUfGm | 722 |
| | CfCmUfGmCfAmUfGmUfG | | CfAmGfGmGfCmUfCm | |
| | mGfA | | GfGmCfAmC*fC*mU | |
| hsMEF2D-8 | mGmUfAmUfAmUfUmGfU | 699 | fGfUmCfAmUfUmAfUm | 723 |
| | mAfAmUfAmAfUmAfAmUf | | UfAmUfUmAfCmAfAm | |
| | GmAfC | | UfAmUfAmC*fU*mU | |
| hsMEF2D-9 | mAmUfAmUfUmGfUmAfA | 700 | fGfAmGfUmCfAmUfUm | 724 |
| | mUfAmAfUmAfAmUfGmAf | | AfUmUfAmUfUmAfCm | |
| | CmUfC | | AfAmUfAmU*fA*mC | |
| hsMEF2D-10 | mUmGfUmAfUmUfGmAfU | 701 | fAfUmCfUmCfAmUfUm | 725 |
| | mAfUmGfAmAfAmUfGmAf | | UfCmAfUmAfUmCfAm | |
| | GmAfU | | AfUmAfCmA*fA*mC | |
| hsMEF2D-11 | mUmUfUmGfUmCfAmAfA | 702 | fAfUmUfAmCfAmAfUm | 726 |
| | mGfUmAfUmAfUmUfGmUf | | AfUmAfCmUfUmUfGm | |
| | AmAfU | | AfCmAfAmA*fA*mA | |
| hsMEF2D-12 | mUmUfUmUfGmUfCmAfA | 703 | fUfUmAfCmAfAmUfAm | 727 |
| | mAfGmUfAmUfAmUfUmGf | | UfAmCfUmUfUmGfAm | |
| | UmAfA | | CfAmAfAmA*fA*mU | |
| hsMEF2D-13 | mGmUfUmGfUmUfGmUfU | 704 | fUfCmAfUmAfUmCfAm | 728 |
| | mGfUmAfUmUfGmAfUmAf | | AfUmAfCmAfAmCfAm | |
| | UmGfA | | AfCmAfAmC*fA*mA | |
| hsMEF2D-14 | mUmGfGmCfAmAfCmAfGm | 705 | fAfCmCfUmUfGmUfUm | 729 |
| | CfCmUfAmAfAmCfAmAfG | | UfAmGfGmCfUmGfUm | |
| | mGfU | | UfGmCfCmA*fU*mU | |
| hsMEF2D-15 | mAmCfAmAfCmAfCmAfGm | 706 | fUfCmAfAmCfUmGfGm | 730 |
| | AfUmUfAmCfCmAfGmUfU | | UfAmAfUmCfUmGfUm | |
| | mGfA | | GfUmUfGmU*fA*mG | |
| hsMEF2D-16 | mAmGfUmGfGmGfCmUfU | 707 | fAfAmCfCmCfAmCfCm | 731 |
| | mGfAmUfGmGfGmUfGmGf | | CfAmUfCmAfAmGfCm | |
| | GmUfU | | CfCmAfCmU*fU*mU | |
| hsMEF2D-17 | mCmUfCmUfAmAfGmAfUm | 708 | fAfUmUfGmCfAmCfUm | 732 |
| | AfUmAfCmAfGmUfGmCfA | | GfUmAfUmAfUmCfUm | |
| | mAfU | | UfAmGfAmG*fA*mA | |
| hsMEF2D-18 | mAmAfGmAfUmAfUmAfC | 709 | fAfGmCfUmAfUmUfGm | 733 |
| | mAfGmUfGmCfAmAfUmAf | | CfAmCfUmGfUmAfUm | |
| | GmCfU | | AfUmCfUmU*fA*mG | |
| hsMEF2D-19 | mGmGfAmGfAmGfGmGfU | 710 | fAfCmCfUmCfAmCfUm | 734 |
| | mCfUmUfCmAfGmUfGmAf | | GfAmAfGmAfCmCfCm | |
| | GmGfU | | UfCmUfCmC*fC*mC | |
| mmMEF2D-1 | mCmAfCmCfGmAfCmAfUm | 711 | fAfGmCfAmCfCmUfUm | 735 |
| | GfGmAfCmAfAmGfGmUfG | | GfUmCfCmAfUmGfUm | |
| | mCfU | | CfGmGfUmG*fC*mU | |
| mmMEF2D-2 | mCmCfAmUfGmCfAmGfUm | 712 | fUfUmGfGmAfUmUfGm | 736 |
| | UfCmAfGmCfAmAfUmCfC | | CfUmGfAmAfCmUfGm | |
| | mAfA | | CfAmUfGmG*fA*mG | |
| mmMEF2D-3 | mUmUfCmAfGmCfAmAfUm | 713 | fAfGmAfGmCfUmAfCm | 737 |
| | CfCmAfAmGfUmAfGmCfU | | UfUmGfGmAfUmUfGm | |
| | mCfU | | CfUmGfAmA*fC*mU | |
| mmMEF2D-4 | mUmGfGmCfAmAfCmAfCm | 714 | fUfGmAfGmUfAmAfAm | 738 |
| | CfAmAfGmUfUmUfAmCfU | | CfUmUfGmGfUmGfUm | |
| | mCfA | | UfGmCfCmA*fC*mG | |
| mmMEF2D-5 | mCmGfGmCfUmGfGmAfUm | 715 | fUfArnAfUmGfUmCfCm | 739 |
| | AfCmUfUmGfGmAfCmAfU | | AfAmGfUmAfUmCfCm | |
| | mUfA | | AfGmCfCmG*fC*mA | |

[0530] i. KLF15 Oligonucleotides

[0531] Examples of oligonucleotides useful for targeting KLF15 are provided in Schoger, E. et al. “CRISPR-Mediated Activation of Endogenous Gene Expression in the Postnatal Heart.” Circ Res. 2019 Nov. 15.; Jiang J. et al. “miR-190a-5p participates in the regulation of hypoxia-induced pulmonary hypertension by targeting KLF15 and can serve as a biomarker of diagnosis and prognosis in chronic obstructive pulmonary disease complicated with pulmonary hypertension.” Int J Chron Obstruct Pulmon Dis. 2018 Nov. 20; 13:3777-3790.; Mamet, J. et al., “Intrathecal administration of AYX2 DNA-decoy produces a long-term pain treatment in rat models of chronic pain by inhibiting the KLF6, KLF9 and KLF15 transcription factors.” Mol Pain. 2017 January-December; 13:1744806917727917.; Tang, Q. et al. “Absence of miR-223-3p ameliorates hypoxia-induced injury through repressing cardiomyocyte apoptosis and oxidative stress by targeting KLF15.” Eur J Pharmacol. 2018 Dec. 15; 841:67-74.; and Horie, T. et al., “MicroRNA-133 regulates the expression of GLUT4 by targeting KLF15 and is involved in metabolic control in cardiac myocytes.” Biochem Biophys Res Commun. 2009 Nov. 13; 389(2):315-20.; the contents of each of which are incorporated herein in their entireties.

[0532] In some embodiments, oligonucleotides may have a region of complementarity to a human KLF15 sequence, for example, as provided below (Gene ID: 28999; NCBI Ref. No: NM_014079.4):

(SEQ ID NO: 740)
AGTGCTCCGCCGCAGCGACCCGCGGGCCGGCGGGCGATCGAGCCAGCGCAGGACCCGCGGCTCGGCC
CCCGGCCGCCGCCGGACCGAGAGTCTAGCCGCCGCCCCCAGCCCAGCCCGCCCGGCCGCAGGACCGC
CGGGGCCTGGCCGCCGGTCCGGCGTGCGCCAAGTTCAGCCGCCACCGGCACGGCCAGGCCAGCATGG
TGGACCACTTACTTCCAGTGGACGAGAACTTCTCGTCGCCAAAATGCCCAGTTGGGTATCTGGGTGAT
AGGCTGGTTGGCCGGCGGGCATATCACATGCTGCCCTCACCCGTCTCTGAAGATGACAGCGATGCCTC
CAGCCCCTGCTCCTGTTCCAGTCCCGACTCTCAAGCCCTCTGCTCCTGCTATGGTGGAGGCCTGGGCAC
CGAGAGCCAGGACAGCATCTTGGACTTCCTATTGTCCCAGGCCACGCTGGGCAGTGGCGGGGGCAGC
GGCAGTAGCATTGGGGCCAGCAGTGGCCCCGTGGCCTGGGGGCCCTGGCGAAGGGCAGCGGCCCCTG
TGAAGGGGGAGCATTTCTGCTTGCCCGAGTTTCCTTTGGGTGATCCTGATGACGTCCCACGGCCCTTCC
AGCCTACCCTGGAGGAGATTGAAGAGTTTCTGGAGGAGAACATGGAGCCTGGAGTCAAGGAGGTCCC
TGAGGGCAACAGCAAGGACTTGGATGCCTGCAGCCAGCTCTCAGCTGGGCCACACAAGAGCCACCTC
CATCCTGGGTCCAGCGGGAGAGAGCGCTGTTCCCCTCCACCAGGTGGTGCCAGTGCAGGAGGTGCCC
AGGGCCCAGGTGGGGGCCCCACGCCTGATGGCCCCATCCCAGTGTTGCTGCAGATCCAGCCCGTGCCT
GTGAAGCAGGAATCGGGCACAGGGCCTGCCTCCCCTGGGCAAGCCCCAGAGAATGTCAAGGTTGCCC
AGCTCCTGGTCAACATCCAGGGGCAGACCTTCGCACTCGTGCCCCAGGTGGTACCCTCCTCCAACTTG
AACCTGCCCTCCAAGTTTGTGCGCATTGCCCCTGTGCCCATTGCCGCCAAGCCTGTTGGATCGGGACC
CCTGGGGCCTGGCCCTGCCGGTCTCCTCATGGGCCAGAAGTTCCCCAAGAACCCAGCCGCAGAACTCA
TCAAAATGCACAAATGTACTTTCCCTGGCTGCAGCAAGATGTACACCAAAAGCAGCCACCTCAAGGC
CCACCTGCGCCGGCACACGGGTGAGAAGCCCTTCGCCTGCACCTGGCCAGGCTGCGGCTGGAGGTTCT
CGCGCTCTGACGAGCTGTCGCGGCACAGGCGCTCGCACTCAGGTGTGAAGCCGTACCAGTGTCCTGTG
TGCGAGAAGAAGTTCGCGCGGAGCGACCACCTCTCCAAGCACATCAAGGTGCACCGCTTCCCGCGGA
GCAGCCGCTCCGTGCGCTCCGTGAACTGAAAGCGCCCTGAACCCCAGCCTGTCCGTCACCCCGGATCC
CCACCCCATCCCCATTTTTTTAAGCAATAATTTATTTGCCTCCTCCAGAGGGACATGGCAATGTTACCA
GCCCACCTTCTGAAGCCTGGGAGGTGTGAACCCAGGGCCCGCCAACCGCTGCCTTTCTCGGGAGTACT
TAGAGCCTCGAACCCGCGTCCCTGGGGGCTGGGCCCCAGGCGCACGGGGCTGGAGGCAGGCCTTCGT
GCCTTCGTGCCTTCGTGCCTTCCCGCGGTGGCCAGGCCTCTGCTGCAGCCGCTGGTTGCAGGCAGAGT
TTTGGGGACCTGGCCCTTCTCCCACTGGGCTCCCCCATCCTGGGCCAAGGCCAGAACTTTAGTGCTAG
GGGAAGATGAAATGTGCAGTTTTGAAATGTTGGGTTTCCAGAGAGAGTCATGCTGGAGGAGAAGGAA
GTAGGCCAGAAGTCCAGGGCTGCACTGTGGTGTGAGGGTGGCTTTGTCTAAGATGCCTGCTCAGCATG
ATCACCAGAGGGTGTGGGCAGGTCCCTGGAGCCGGGGGGGGGGGGGGGGGGGGGGGGGGGCAGGAC
CGGGCCGCTGGGCCCTCATGTGGGAGAGAGGTGAAAAGCGTCCCCCACTAGGGGGCTGGCAGTGCAT
GTGCTTGAGTTAAATGTGCAGGGCAGACAGAGCCAGAAGGGCCTGTACCCAGGGGCTCGTCCCCTCC

TCCGGTTTCCCAGACAAATCCAGACACCAGCCTTTAGGGTGGCCTTGGGAGGAGAGGGCCAGGCTGT
CCTGGGTGTGAGAGAACTAGATAGAGCCTCCCAACCCTGATTTAGAAATGCATTCCTTATTTTGTCTA
GAAATTAATAAATGAACTAGCTTGTTTTGACAGGTTTATTTCACATCCTATGAATGTATGTAAATAAA
CTGTACATAGGTCCATCCACATAAAATATCTTTTAATAACATATCAACATTTGTGTAAATTTGAAATTT
AAAAAAATCTATGAAGCTGGTGTACATATGTTACAATTACGTATATTTTCTTTGGTCCTTCATAAAAAT
ATATTTACTTTGCCAATAAAAAGAAAAAGAACTCACA

[0533] In some embodiments, oligonucleotides may have a region of complementarity to a mouse KLF15 sequence, for example, as provided below (Gene ID: 66277; NCBI Ref. No: NM_023184.4)

(SEQ ID NO: 741)
GTGAGCGGCCGGAGAGCGGGGAGAGCGGCGAGCGGCGAGCGCCCAGCTCGGCCGCAGGGAGTGCGG
GCTGCGGCCAGGAGCGCTGGACGCGCGGCCGCATACGGAGCCGGGCCGCACGCGCGAGGCCGCGCC
AGGCGACGCGGAGTCCAGTCACCACAGGCTCGGCCAGGCCAGCATGGTGGACCACCTGCTTCCAGTG
GACGAGACCTTCTCGTCACCGAAATGCTCAGTGGGTTACCTAGGGGACAGGCTGGCCAGCCGGCAGC
CATACCACATGTTGCCCTCGCCCATCTCGGAGGATGACAGCGATGTCTCCAGCCCCTGCTCTTGTGCC
AGCCCTGACTCGCAAGCCTTCTGTTCCTGCTACAGTGCGGGTCCAGGCCCTGAGGCCCAGGGCAGCAT
CTTGGATTTCCTCCTGTCCCGGGCCACACTGGGCAGTGGTGGTGGCAGTGGAGGTATTGGAGATAGCA
GTGGCCCTGTGACCTGGGGATCATGGAGGAGAGCCTCTGTGCCTGTGAAGGAGGAACATTTCTGCTTC
CCTGAATTTCTGTCAGGGGACACTGATGACGTCTCCAGGCCCTTCCAGCCTACCCTGGAGGAGATTGA
AGAATTCCTGGAAGAGAACATGGAGGCTGAGGTCAAGGAGGCCCCAGAGAACGGTAGCAGGGACCT
GGAGACCTGTAGCCAGCTCTCAGCTGGGTCACACCGGAGCCACCTTCATCCAGAGTCTGCTGGGAGA
GAGCGCTGTACCCCACCACCAGGTGGCACGAGTGGGGGTGGTGCCCAAAGTGCAGGTGAGGGGCCAG
CACATGATGGCCCCGTGCCGGTGCTACTGCAGATCCAGCCTGTTGCTGTGAAGCAGGAGGCAGGTAC
AGGGCCAGCCTCCCCAGGGCAGGCCCCAGAGAGCGTCAAGGTCGCCCAGCTTCTAGTCAACATCCAG
GGGCAGACCTTTGCACTCCTGCCTCAAGTGGTACCATCCTCCAACTTGAACCTGCCCTCAAAGTTTGTG
CGAATTGCGCCTGTGCCCATTGCCGCCAAACCTATTGGCTCAGGATCCCTAGGGCCCGGCCCTGCTGG
CCTCCTTGTGGGCCAGAAGTTTCCCAAGAACCCAGCAGCAGAACTTCTCAAAATGCACAAATGCACTT
TCCCAGGCTGCAGCAAGATGTACACCAAGAGCAGCCACCTCAAGGCCCACCTGCGTCGGCACACAGG
CGAGAAGCCCTTTGCCTGCACCTGGCCAGGCTGCGGCTGGAGGTTTTCCCGCTCAGATGAGTTGTCAA
GGCACCGGCGATCTCACTCGGGTGTGAAGCCGTACCAGTGTCCCGTGTGCGAGAAGAAATTCGCGCG
GAGTGACCACCTCTCCAAACACATCAAAGTGCATCGCTTCCCACGAAGCAGCCGCGCAGTACGCGCC
ATCAACTGAGCGCAGTGGCCGCCCTTCCCTCCCCCAGCTCCACGTTTTGTTTTTAAATGCAATAACTTA
TTGCCTCTTTTCAGAAGGATGTGACAATATTACCAGCCCCCTCCCCCTTCTGAATCTTAGGAGGTATGA
CCCAGAGCCACCATGGCTGCCTTTCTGGGGAAGACCTAGAGTCCCTATGGTCCCTGGGGGCTGGTTCC
CCGGTGGCCCAGGTGGCCCAGGCAGGCCTGTGCCCTTGTGCCTTTGTGCCTTCCTGCCAGCTGGAAGC
AGTGTTTGGGGGGCCCTTGCCCTCTTCCCACTGGGCTCCCTACCTGGGCCAAAGTCAACATCATTGCTG
GGGAAGAAGTGTTTTGGCTGTGTCAAAATAGTAGCTCCCAGAGGAAGCAAGCCATGCTGGGAAAAAG
GAAGTGGGTCAAAAAAGCGTAGGGCTGCACTGTGATGTGAGGACCGCCATATGCAAGAGGCCTTTGA
GGGTCCAGGAGGATGGCCACCCTCGCTCTAGGCCGTAATGCATGTGCTTAAATGCAAGACAAATGGA
GCCATAGCCAGCCGTACCCAGCCTGGCTCACCCTCCTCCAGACACCAGACACCAGCCTCCTGGTTGTG
GTGAGAGGAGAAGGGAACAGGTCTGGTGGATGCCAAGCAACTAGTTAGTGCCTCCCAGTCTGACCTA
GATTTGCATTCCTCATCAGGACTAGAAATTAGTACCAATTGAACTAGCTTGTTTTGACAGGTCTATTTC
ACATCCTATGAATGTATGTAAATAAACTGTACATAGGTACGCATCTACATAAAATATCTTTTAATAAC
ACGTTGACATTTGTGTAAATTTGAAATTTAAAAAAATTCTATAAAGTTGGTGTACATATGTTACAATTA
TGTATATTTTCTTTGGTCCTTCATAAAAAATATATTTACTTTGCCAATAAAAAGAGGAAAAAAAAAAA
GAACTC

[0534] In some embodiments, an oligonucleotide comprises a region of complementarity to a KLF15 sequence as set forth in SEQ ID NO: 740 or SEQ ID NO: 741. In some embodiments, the oligonucleotide comprises a region of complementarity that is at least 80%, 85%, 90%, 95%, 96%, 97%, 98%, 99%, or 100% complementary to a KLF15 sequence as set forth in SEQ ID NO: 740 or SEQ ID NO: 741. In some embodiments, the oligonucleotide comprises a sequence that has at least 10, 11, 12, 13, 14, 15, 16, 17, 18, or 19 consecutive nucleotides that are perfectly complementary to a KLF15 sequence as set forth in SEQ ID NO: 740 or SEQ ID NO: 741. In some embodiments, an oligonucleotide may comprise a sequence that targets (e.g., is complementary to) an RNA version (i.e., wherein the T's are replaced with U's) of a KLF15 sequence as set forth in SEQ ID NO: 740 or SEQ ID NO: 741. In some embodiments, the oligonucleotide comprises a sequence that is complementary (e.g., at least 80%, 85%, 90%, 95%, 96%, 97%, 98%, 99%, or 100% complementary) to an RNA version of a KLF15 sequence as set forth in SEQ ID NO: 740 or SEQ ID NO: 741. In some embodiments, the oligonucleotide comprises a sequence that has at least 10, 11, 12, 13, 14, 15, 16, 17, 18, or 19 consecutive nucleotides that are perfectly complementary to an RNA version of a KLF15 sequence as set forth in SEQ ID NO: 740 or SEQ ID NO: 741.

[0535] In some embodiments, a KLF15-targeting oligonucleotide comprises an antisense strand that comprises at least 10, 11, 12, 13, 14, 15, 16, 17, 18, or 19 consecutive nucleotides of a sequence comprising any one of SEQ ID NOs: 790-813. In some embodiments, a KLF15-targeting oligonucleotide comprises an antisense strand that comprises any one of SEQ ID NOs: 790-813. In some embodiments, a KLF15-targeting oligonucleotide comprises an antisense strand that comprises shares at least 70%, 75%, 80%, 85%, 90%, 95%, or 97% sequence identity with at least 12 or at least 15 consecutive nucleotides of any one of SEQ ID NOs: 790-813.

[0536] In some embodiments, a KLF15-targeting oligonucleotide comprises an antisense strand that targets a KLF15 sequence comprising any one of SEQ ID NOs: 742-789. In some embodiments, an oligonucleotide comprises an antisense strand comprising at least 10, 11, 12, 13, 14, 15, 16, 17, 18, or 19 nucleotides (e.g., consecutive nucleotides) that are complementary to a KLF15 sequence comprising any one of SEQ ID NOs: 742-789. In some embodiments, a KLF15-targeting oligonucleotide comprises an antisense strand comprising a sequence that is at least 70%, 75%, 80%, 85%, 90%, 95%, or 97% complementary with at least 12 or at least 15 consecutive nucleotides of any one of SEQ ID NOs: 742-789.

[0537] In some embodiments, a KLF15-targeting oligonucleotide comprises an antisense strand comprises a region of complementarity to a target sequence as set forth in any one of SEQ ID NOs: 742-789. In some embodiments, the region of complementarity is at least 8, at least 9, at least 10, at least 11, at least 12, at least 13, at least 14, at least 15, at least 16, at least 17, or at least 19 nucleotides in length. In some embodiments, the region of complementarity is 8, 9, 10, 11, 12, 13, 14, 15, 16, 17, 18, or 19 nucleotides in length. In some embodiments, the region of complementarity is in the range of 8 to 20, 10 to 20 or 15 to 20 nucleotides in length. In some embodiments, the region of complementarity is fully complementary with all or a portion of its target sequence. In some embodiments, the region of complementarity includes 1, 2, 3 or more mismatches.

[0538] In some embodiments, a KLF15-targeting oligonucleotide further comprises a sense strand that hybridizes to the antisense strand to form a double stranded siRNA. In some embodiments, the KLF15-targeting oligonucleotide comprises an antisense strand that comprises the nucleotide sequence of any one of SEQ ID NOs: 790-813. In some embodiments, the KLF15-targeting oligonucleotide further comprises a sense strand that comprises the nucleotide sequence of any one of SEQ ID NOs: 766-789.

[0539] In some embodiments, the KLF15-targeing oligonucleotide is a double stranded oligonucleotide (e.g., an siRNA) comprising an antisense strand that comprises the nucleotide sequence of any one of SEQ ID NOs: 790-813 and a sense strand that hybridizes to the antisense strand and comprises the nucleotide sequence of any one of SEQ ID NOs: 766-789, wherein the antisense strand and/or (e.g., and) comprises one or more modified nucleosides (e.g., 2′-modified nucleosides). In some embodiment, the one or more modified nucleosides are selected from 2′-O-Me and 2′-F modified nucleosides.

[0540] In some embodiments, the KLF15-targeing oligonucleotide is a double stranded oligonucleotide (e.g., an siRNA) comprising an antisense strand that comprises the nucleotide sequence of any one of SEQ ID NOs: 790-813 and a sense strand that hybridizes to the antisense strand and comprises the nucleotide sequence of any one of SEQ ID NOs: 766-789, wherein the each nucleoside in the antisense strand and/or (e.g., and) each nucleoside in the sense strand is a 2′-modified nucleoside selected from 2′-O-Me and 2′-F modified nucleosides.

[0541] In some embodiments, the KLF15-targeing oligonucleotide is a double stranded oligonucleotide (e.g., an siRNA) comprising an antisense strand that comprises the nucleotide sequence of any one of SEQ ID NOs: 790-813 and a sense strand that hybridizes to the antisense strand and comprises the nucleotide sequence of any one of SEQ ID NOs: 766-789, wherein the each nucleoside in the antisense strand and each nucleoside in the sense strand is a 2′-modified nucleoside selected from 2′-O-Me and 2′-F modified nucleosides, and wherein the antisense strand and/or (e.g., and) the sense strand each comprises one or more phosphorothioate internucleoside linkages. In some embodiments, the sense strand does not comprise any phosphorothioate internucleoside linkages (all the internucleoside linkages in the sense strand are phosphodiester internucleoside linkages), and the antisense strand comprises 1, 2, or 3 phosphorothioate internucleoside linkages. In some embodiments, the antisense strand comprises 2 phosphorothioate internucleoside linkages, optionally wherein the two internucleoside linkages at the 3′ end of the antisense strand are phosphorothioate internucleoside linkages and the rest of the internucleoside linkages in the antisense strand are phosphodiester internucleoside linkages,

[0542] In some embodiments, the antisense strand of the KLF15-targeing oligonucleotide comprises a structure of (5′ to 3′): fNfNmNfNmNfNmNfNmNfNmNfNmNfNmNfNmNfNmNfNmN*fN*mN, wherein “mN” indicates 2′-O-methyl (2′-O-Me) modified nucleosides; “fN” indicates 2′-fluoro (2′-F) modified nucleosides; “*” indicates phosphrothioate internucleoside linkage; and the absence of “*” between two nucleosides indicate phosphodiester internucleoside linkage.

[0543] In some embodiments, the sense strand of the KLF15-targeing oligonucleotide comprises a structure of (5′ to 3′): mNmNfNmNfNmNfNmNfNmNfNmNfNmNfNmNfNmNfNmNfN, wherein “mN” indicates 2′-O-methyl (2′-O-Me) modified nucleosides; “fN” indicates 2′-fluoro (2′-F) modified nucleosides; and the absence of “*” between two nucleosides indicate phosphodiester internucleoside linkage.

[0544] In some embodiments, the antisense strand of the KLF15-targeing oligonucleotide is selected from the modified version of SEQ ID NOs: 790-813 listed in Table 31. In some embodiments, the sense strand of the KLF15-targeing oligonucleotide is selected from the modified version of SEQ ID NOs: 766-789 listed in Table 31. In some embodiments, the KLF15-targeing oligonucleotide is a siRNA selected from the siRNAs listed in Table 31.

TABLE 29
KLF15 Target Sequences

| | Corresponding | | |
|---|---|---|---|
| | nucleotides of the | KLF15 Target Sequence | SEQ ID |
| Reference sequence | Reference Sequence | (5’ to 3’) | NO: |
| NM_014079.4 (SEQ | 1180-1199 | GCAGCAAGATGTACACCAA | 742 |
| ID NO: 740) | | | |
| NM_014079.4 (SEQ | 2350-2369 | AATGTATGTAAATAAACTG | 743 |
| ID NO: 740) | | | |
| NM_014079.4 (SEQ | 2352-2371 | TGTATGTAAATAAACTGTA | 744 |
| ID NO: 740) | | | |
| NM_014079.4 (SEQ | 2354-2372 | TATGTAAATAAACTGTACA | 745 |
| ID NO: 740) | | | |
| NM_014079.4 (SEQ | 2358-2377 | TAAATAAACTGTACATAGG | 746 |
| ID NO: 740) | | | |
| NM_014079.4 (SEQ | 2476-2495 | TATATTTTCTTTGGTCCTT | 747 |
| ID NO: 740) | | | |
| NM_014079.4 (SEQ | 2503-2522 | TATATTTACTTTGCCAATA | 748 |
| ID NO: 740) | | | |
| NM_014079.4 (SEQ | 240-259 | CCAAAATGCCCAGTTGGGT | 749 |
| ID NO: 740) | | | |
| NM_014079.4 (SEQ | 619-638 | TGGAGGAGATTGAAGAGTT | 750 |
| ID NO: 740) | | | |
| NM_014079.4 (SEQ | 1511-1530 | GCAATAATTTATTTGCCTC | 751 |
| ID NO: 740) | | | |
| NM_014079.4 (SEQ | 2379-2398 | CATCCACATAAAATATCTT | 752 |
| ID NO: 740) | | | |
| NM_014079.4 (SEQ | 688-707 | GCAAGGACTTGGATGCCTG | 753 |
| ID NO: 740) | | | |
| NM_014079.4 (SEQ | 1340-1359 | CCAGTGTCCTGTGTGCGAG | 754 |
| ID NO: 740) | | | |
| NM_014079.4 (SEQ | 1615-1634 | CGGGAGTACTTAGAGCCTC | 755 |
| ID NO: 740) | | | |
| NM_014079.4 (SEQ | 2330-2349 | GGTTTATTTCACATCCTAT | 756 |
| ID NO: 740) | | | |
| NM_023184.4 (SEQ | 1532-1551 | TCTGAATCTTAGGAGGTAT | 757 |
| ID NO: 741) | | | |
| NM_023184.4 (SEQ | 2204-2223 | CATCTACATAAAATATCTT | 758 |
| ID NO: 741) | | | |
| NM_023184.4 (SEQ | 1160-1179 | AAGATGTACACCAAGAGCA | 759 |
| ID NO: 741) | | | |
| NM_023184.4 (SEQ | 997-1016 | CTCAAAGTTTGTGCGAATT | 760 |
| ID NO: 741) | | | |
| NM_023184.4 (SEQ | 2118-2137 | GAAATTAGTACCAATTGAA | 761 |
| ID NO: 741) | | | |
| NM_023184.4 (SEQ | 393-412 | AGGGCAGCATCTTGGATTT | 762 |
| ID NO: 741) | | | |
| NM_023184.4 (SEQ | 2231-2250 | ACGTTGACATTTGTGTAAA | 763 |
| ID NO: 741) | | | |
| NM_023184.4 (SEQ | 2120-2139 | AATTAGTACCAATTGAACT | 764 |
| ID NO: 741) | | | |
| NM_023184.4 (SEQ | 263-282 | CAGCCATACCACATGTTGC | 765 |
| ID NO: 741) | | | |

*The target sequences contain Ts, but binding to RNA and/or DNA is contemplated.

[0545] In some embodiments, an oligonucleotide may comprise or consist of any sequence as provided in Table 30.

TABLE 30
Oligonucleotide sequences for targeting KLF15

| Passenger Strand/ | | Guide Strand/ | |
|---|---|---|---|
| Sense Strand | SEQ ID | Antisense Strand | SEQ ID |
| (RNA) (5’ to 3’) | NO: | (RNA) (5’ to 3’) | NO: |
| CUGCAGCAAGAUGUACACCAA | 766 | UUGGUGUACAUCUUGCUGCAGCC | 790 |
| UGAAUGUAUGUAAAUAAACUG | 767 | CAGUUUAUUUACAUACAUUCAUA | 791 |
| AAUGUAUGUAAAUAAACUGUA | 768 | UACAGUUUAUUUACAUACAUUCA | 792 |
| UGUAUGUAAAUAAACUGUACA | 769 | UGUACAGUUUAUUUACAUACAUU | 793 |
| UGUAAAUAAACUGUACAUAGG | 770 | CCUAUGUACAGUUUAUUUACAUA | 794 |
| CGUAUAUUUUCUUUGGUCCUU | 771 | AAGGACCAAAGAAAAUAUACGUA | 795 |
| AAUAUAUUUACUUUGCCAAUA | 772 | UAUUGGCAAAGUAAAUAUAUUUU | 796 |
| CGCCAAAAUGCCCAGUUGGGU | 773 | ACCCAACUGGGCAUUUUGGCGAC | 797 |
| CCUGGAGGAGAUUGAAGAGUU | 774 | AACUCUUCAAUCUCCUCCAGGGU | 798 |
| AAGCAAUAAUUUAUUUGCCUC | 775 | GAGGCAAAUAAAUUAUUGCUUAA | 799 |
| UCCAUCCACAUAAAAUAUCUU | 776 | AAGAUAUUUUAUGUGGAUGGACC | 800 |
| CAGCAAGGACUUGGAUGCCUG | 777 | CAGGCAUCCAAGUCCUUGCUGUU | 801 |
| UACCAGUGUCCUGUGUGCGAG | 778 | CUCGCACACAGGACACUGGUACG | 802 |
| CUCGGGAGUACUUAGAGCCUC | 779 | GAGGCUCUAAGUACUCCCGAGAA | 803 |
| CAGGUUUAUUUCACAUCCUAU | 780 | AUAGGAUGUGAAAUAAACCUGUC | 804 |
| CUUCUGAAUCUUAGGAGGUAU | 781 | AUACCUCCUAAGAUUCAGAAGGG | 805 |
| CGCAUCUACAUAAAAUAUCUU | 782 | AAGAUAUUUUAUGUAGAUGCGUA | 806 |
| GCAAGAUGUACACCAAGAGCA | 783 | UGCUCUUGGUGUACAUCUUGCUG | 807 |
| CCCUCAAAGUUUGUGCGAAUU | 784 | AAUUCGCACAAACUUUGAGGGCA | 808 |
| UAGAAAUUAGUACCAAUUGAA | 785 | UUCAAUUGGUACUAAUUUCUAGU | 809 |
| CCAGGGCAGCAUCUUGGAUUU | 786 | AAAUCCAAGAUGCUGCCCUGGGC | 810 |
| ACACGUUGACAUUUGUGUAAA | 787 | UUUACACAAAUGUCAACGUGUUA | 811 |
| GAAAUUAGUACCAAUUGAACU | 788 | AGUUCAAUUGGUACUAAUUUCUA | 812 |
| GGCAGCCAUACCACAUGUUGC | 789 | GCAACAUGUGGUAUGGCUGCCGG | 813 |

[0546] In some embodiments, an oligonucleotide is a modified oligonucleotide as provided in Table 31, wherein ‘mN’ represents a 2′-O-methyl modified nucleoside (e.g., mU is 2′-O-methyl modified uridine), ‘fN’ represents a 2′-fluoro modified nucleoside (e.g., fU is 2′-fluoro modified uridine), ‘*’ represents a phosphorothioate internucleoside linkage, and lack of “*” between nucleosides indicate phosphodiester internucleoside linkage.

TABLE 31
Modified Oligonucleotides for targeting KLF15

| | Modified Passenger | | Modified Guide | |
|---|---|---|---|---|
| | Strand/Sense Strand | SEQ ID | Strand/Antisense Strand | SEQ ID |
| siRNA # | (RNA) (5’ to 3’) | NO: | (RNA) (5’ to 3’) | NO: |
| hsKLF15-1 | mCmUfGmCfAmGfCmAfAm | 766 | fUfUmGfGmUfGmUfAmCfAm | 790 |
| | GfAmUfGmUfAmCfAmCfC | | UfCmUfUmGfCmUfGmCfAmG | |
| | mAfA | | *fC*mC | |
| hsKLF15-2 | mUmGfAmAfUmGfUmAfU | 767 | fCfAmGfUmUfUmAfUmUfUm | 791 |
| | mGfUmAfAmAfUmAfAmAf | | AfCmAfUmAfCmAfUmUfCmA | |
| | CmUfG | | *fU*mA | |
| hsKLF15-3 | mAmAfUmGfUmAfUmGfU | 768 | fUfAmCfAmGfUmUfUmAfUm | 792 |
| | mAfAmAfUmAfAmAfCmUf | | UfUmAfCmAfUmAfCmAfUmU | |
| | GmUfA | | *fC*mA | |
| hsKLF15-4 | mUmGfUmAfUmGfUmAfA | 769 | fUfGmUfAmCfAmGfUmUfUm | 793 |
| | mAfUmAfAmAfCmUfGmUf | | AfUmUfUmAfCmAfUmAfCmA | |
| | AmCfA | | *fU*mU | |
| hsKLF15-5 | mUmGfUmAfAmAfUmAfA | 770 | fCfCmUfAmUfGmUfAmCfAmG | 794 |
| | mAfCmUfGmUfAmCfAmUf | | fUmUfUmAfUmUfUmAfCmA*f | |
| | AmGfG | | U*mA | |
| hsKLF15-6 | mCmGfUmAfUmAfUmUfU | 771 | fAfAmGfGmAfCmCfAmAfAmG | 795 |
| | mUfCmUfUmUfGmGfUmCf | | fAmAfAmAfUmAfUmAfCmG*f | |
| | CmUfU | | U*mA | |
| hsKLF15-7 | mAmAfUmAfUmAfUmUfU | 772 | fUfAmUfUmGfGmCfAmAfAm | 796 |
| | mAfCmUfUmUfGmCfCmAf | | GfUmAfAmAfUmAfUmAfUmU | |
| | AmUfA | | *fU*mU | |
| hsKLF15-8 | mCmGfCmCfAmAfAmAfUm | 773 | fAfCmCfCmAfAmCfUmGfGmG | 797 |
| | GfCmCfCmAfGmUfUmGfG | | fCmAfUmUfUmUfGmGfCmG*f | |
| | mGfU | | A*mC | |
| hsKLF15-9 | mCmCfUmGfGmAfGmGfAm | 774 | fAfAmCfUmCfUmUfCmAfAmU | 798 |
| | GfAmUfUmGfAmAfGmAfG | | fCmUfCmCfUmCfCmAfGmG*f | |
| | mUfU | | G*mU | |
| hsKLF15-10 | mAmAfGmCfAmAfUmAfA | 775 | fGfAmGfGmCfAmAfAmUfAm | 799 |
| | mUfUmUfAmUfUmUfGmCf | | AfAmUfUmAfUmUfGmCfUmU | |
| | CmUfC | | *fA*mA | |
| hsKLF15-11 | mUmCfCmAfUmCfCmAfCm | 776 | fAfAmGfAmUfAmUfUmUfUm | 800 |
| | AfUmAfAmAfAmUfAmUfC | | AfUmGfUmGfGmAfUmGfGmA | |
| | mUfU | | *fC*mC | |
| hsKLF15-12 | mCmAfGmCfAmAfGmGfAm | 777 | fCfAmGfGmCfAmUfCmCfAmA | 801 |
| | CfUmUfGmGfAmUfGmCfC | | fGmUfCmCfUmUfGmCfUmG*f | |
| | mUfG | | U*mU | |
| hsKLF15-13 | mUmAfCmCfAmGfUmGfUm | 778 | fCfUmCfGmCfAmCfAmCfAmG | 802 |
| | CfCmUfGmUfGmUfGmCfG | | fGmAfCmAfCmUfGmGfUmA*f | |
| | mAfG | | C*mG | |
| hsKLF15-14 | mCmUfCmGfGmGfAmGfUm | 779 | fGfAmGfGmCfUmCfUmAfAmG | 803 |
| | AfCmUfUmAfGmAfGmCfC | | fUmAfCmUfCmCfCmGfAmG*f | |
| | mUfC | | A*mA | |
| hsKLF15-15 | mCmAfGmGfUmUfUmAfU | 780 | fAfUmAfGmGfAmUfGmUfGm | 804 |
| | mUfUmCfAmCfAmUfCmCf | | AfAmAfUmAfAmAfCmCfUmG | |
| | UmAfU | | *fU*mC | |
| mmKLF15-l | mCmUfUmCfUmGfAmAfUm | 781 | fAfUmAfCmCfUmCfCmUfAmA | 805 |
| | CfUmUfAmGfGmAfGmGfU | | fGmAfUmUfCmAfGmAfAmG*f | |
| | mAfU | | G*mG | |
| mmKLF15-2 | mCmGfCmAfUmCfUmAfCm | 782 | fAfAmGfAmUfAmUfUmUfUm | 806 |
| | AfUmAfAmAfAmUfAmUfC | | AfUmGfUmAfGmAfUmGfCmG | |
| | mUfU | | *fU*mA | |
| mmKLF15-3 | mGmCfAmAfGmAfUmGfU | 783 | fUfGmCfUmCfUmUfGmGfUmG | 807 |
| | mAfCmAfCmCfAmAfGmAf | | fUmAfCmAfUmCfUmUfGmC*f | |
| | GmCfA | | U*mG | |
| mmKLF15-3 | mCmCfCmUfCmAfAmAfGm | 784 | fAfAmUfUmCfGmCfAmCfAmA | 808 |
| | UfUmUfGmUfGmCfGmAfA | | fAmCfUmUfUmGfAmGfGmG*f | |
| | mUfU | | C*mA | |
| mmKLF15-5 | mUmAfGmAfAmAfUmUfA | 785 | fUfUmCfAmAfUmUfGmGfUm | 809 |
| | mGfUmAfCmCfAmAfUmUf | | AfCmUfAmAfUmUfUmCfUmA | |
| | GmAfA | | *fG*mU | |
| mmKLF15-6 | mCmCfAmGfGmGfCmAfGm | 786 | fAfAmAfUmCfCmAfAmGfAmU | 810 |
| | CfAmUfCmUfUmGfGmAfU | | fGmCfUmGfCmCfCmUfGmG*f | |
| | mUfU | | G*mC | |
| mmKLF15-7 | mAmCfAmCfGmUfUmGfAm | 787 | fUfUmUfAmCfAmCfAmAfAmU | 811 |
| | CfAmUfUmUfGmUfGmUfA | | fGmUfCmAfAmCfGmUfGmU*f | |
| | mAfA | | U*mA | |
| mmKLF15-8 | mGmAfAmAfUmUfAmGfU | 788 | fAfGmUfUmCfAmAfUmUfGm | 812 |
| | mAfCmCfAmAfUmUfGmAf | | GfUmAfCmUfAmAfUmUfUmC | |
| | AmCfU | | *fU*mA | |
| mmKLF15-9 | mGmGfCmAfGmCfCmAfUm | 789 | fGfCmAfAmCfAmUfGmUfGmG | 813 |
| | AfCmCfAmCfAmUfGmUfU | | fUmAfUmGfGmCfUmGfCmC*f | |
| | mGfC | | G*mG | |

[0547] j. MED1 Oligonucleotides

[0548] Examples of oligonucleotides useful for targeting MED1 are provided in Cai, Q. et. al. “MicroRNA-1291 mediates cell proliferation and tumorigenesis by downregulating MED1 in prostate cancer” Oncol Lett. 2019 March; 17(3):3253-3260.; Zhang, L. et. al. “Silencing MED1 Sensitizes Breast Cancer Cells to Pure Anti-Estrogen Fulvestrant In Vitro and In Vivo” PLoS One. 2013, 8(7): e70641.; Mouillet J. F. et. al. “MiR-205 silences MED1 in hypoxic primary human trophoblasts” FASEB J. 2010 June; 24(6):2030-9.; and Ndong, Jde. L. et al. “Down-regulation of the expression of RB18A/MED1, a cofactor of transcription, triggers strong tumorigenic phenotype of human melanoma cells” Int J Cancer. 2009, 124 (11):2597-606.; the contents of each of which are incorporated herein in their entireties.

[0549] In some embodiments, oligonucleotides may have a region of complementarity to a human MED1 sequence, for example, as provided below (Gene ID: 5469; NCBI Ref. No: NM_004774.4):

(SEQ ID NO: 814)
GAAGTTCCGTTGGGGAAGATGGCGGCGGCCTCGAGCACCCTTCTCTTCTTGCCGCCGGGGACTTCAGA
TTGATCCTTCCCGGGAAGAGTAGGGACTGCTGGTGCCCTGCGTCCCGGGATCCCGAGCCAACTTGTTT
CCTCCGTTAGTGGTGGGGAAGGGCTTATCCTTTTGTGGCGGATCTAGCTTCTCCTCGCCTTCAGGATGA
AAGCTCAGGGGGAAACCGAGGAGTCAGAAAAGCTGAGTAAGATGAGTTCTCTCCTGGAACGGCTCCA
TGCAAAATTTAACCAAAATAGACCCTGGAGTGAAACCATTAAGCTTGTGCGTCAAGTCATGGAGAAG
AGGGTTGTGATGAGTTCTGGAGGGCATCAACATTTGGTCAGCTGTTTGGAGACATTGCAGAAGGCTCT
CAAAGTAACATCTTTACCAGCAATGACTGATCGTTTGGAGTCCATAGCAAGACAGAATGGACTGGGCT
CTCATCTCAGTGCCAGTGGCACTGAATGTTACATCACGTCAGATATGTTCTATGTGGAAGTGCAGTTA
GATCCTGCAGGACAGCTTTGTGATGTAAAAGTGGCTCACCATGGGGAGAATCCTGTGAGCTGTCCGGA
GCTTGTACAGCAGCTAAGGGAAAAAAATTTTGATGAATTTTCTAAGCACCTTAAGGGCCTTGTTAATC
TGTATAACCTTCCAGGGGACAACAAACTGAAGACTAAAATGTACTTGGCTCTCCAATCCTTAGAACAA
GATCTTTCTAAAATGGCAATTATGTACTGGAAAGCAACTAATGCTGGTCCCTTGGATAAGATTCTTCA
TGGAAGTGTTGGCTATCTCACACCAAGGAGTGGGGGTCATTTAATGAACCTGAAGTACTATGTCTCTC
CTTCTGACCTACTGGATGACAAGACTGCATCTCCCATCATTTTGCATGAGAATAATGTTTCTCGATCTT
TGGGCATGAATGCATCAGTGACAATTGAAGGAACATCTGCTGTGTACAAACTCCCAATTGCACCATTA
ATTATGGGGTCACATCCAGTTGACAATAAATGGACCCCTTCCTTCTCCTCAATCACCAGTGCCAACAG
TGTTGATCTTCCTGCCTGTTTCTTCTTGAAATTTCCCCAGCCAATCCCAGTATCTAGAGCATTTGTTCAG
AAACTGCAGAACTGCACAGGAATTCCATTGTTTGAAACTCAACCAACTTATGCACCCCTGTATGAACT
GATCACTCAGTTTGAGCTATCAAAGGACCCTGACCCCATACCTTTGAATCACAACATGAGATTTTATG
CTGCTCTTCCTGGTCAGCAGCACTGCTATTTCCTCAACAAGGATGCTCCTCTTCCAGATGGCCGAAGTC
TACAGGGAACCCTTGTTAGCAAAATCACCTTTCAGCACCCTGGCCGAGTTCCTCTTATCCTAAATCTGA
TCAGACACCAAGTGGCCTATAACACCCTCATTGGAAGCTGTGTCAAAAGAACTATTCTGAAAGAAGA
TTCTCCTGGGCTTCTCCAATTTGAAGTGTGTCCTCTCTCAGAGTCTCGTTTCAGCGTATCTTTTCAGCAC
CCTGTGAATGACTCCCTGGTGTGTGTGGTAATGGATGTGCAGGACTCAACACATGTGAGCTGTAAACT
CTACAAAGGGCTGTCGGATGCACTGATCTGCACAGATGACTTCATTGCCAAAGTTGTTCAAAGATGTA
TGTCCATCCCTGTGACGATGAGGGCTATTCGGAGGAAAGCTGAAACCATTCAAGCCGACACCCCAGC
ACTGTCCCTCATTGCAGAGACAGTTGAAGACATGGTGAAAAAGAACCTGCCCCCGGCTAGCAGCCCA
GGGTATGGCATGACCACAGGCAACAACCCAATGAGTGGTACCACTACACCAACCAACACCTTTCCGG
GGGGTCCCATTACCACCTTGTTTAATATGAGCATGAGCATCAAAGATCGGCATGAGTCGGTGGGCCAT
GGGGAGGACTTCAGCAAGGTGTCTCAGAACCCAATTCTTACCAGTTTGTTGCAAATCACAGGGAACG
GGGGGTCTACCATTGGCTCGAGTCCGACCCCTCCTCATCACACGCCGCCACCTGTCTCTTCGATGGCC
GGCAACACCAAGAACCACCCGATGCTCATGAACCTTCTTAAAGATAATCCTGCCCAGGATTTCTCAAC
CCTTTATGGAAGCAGCCCTTTAGAAAGGCAGAACTCCTCTTCCGGCTCACCCCGCATGGAAATATGCT
CGGGGAGCAACAAGACCAAGAAAAAGAAGTCATCAAGATTACCACCTGAGAAACCAAAGCACCAGA
CTGAAGATGACTTTCAGAGGGAGCTATTTTCAATGGATGTTGACTCACAGAACCCTATCTTTGATGTC
AACATGACAGCTGACACGCTGGATACGCCACACATCACTCCAGCTCCAAGCCAGTGTAGCACTCCCCC
AACAACTTACCCACAACCAGTACCTCACCCCCAACCCAGTATTCAAAGGATGGTCCGACTATCCAGTT
CAGACAGCATTGGCCCAGATGTAACTGACATCCTTTCAGACATTGCAGAAGAAGCTTCTAAACTTCCC
AGCACTAGTGATGATTGCCCAGCCATTGGCACCCCTCTTCGAGATTCTTCAAGCTCTGGGCATTCTCAG
AGTACCCTGTTTGACTCTGATGTCTTTCAAACTAACAATAATGAAAATCCATACACTGATCCAGCTGA
TCTTATTGCAGATGCTGCTGGAAGCCCCAGTAGTGACTCTCCTACCAATCATTTTTTTCATGATGGAGT
AGATTTCAATCCTGATTTATTGAACAGCCAGAGCCAAAGTGGTTTTGGAGAAGAATATTTTGATGAAA
GCAGCCAAAGTGGGGATAATGATGATTTCAAAGGATTTGCATCTCAGGCACTAAATACTTTGGGGGTG
CCAATGCTTGGAGGTGATAATGGGGAGACCAAGTTTAAGGGCAATAACCAAGCCGACACAGTTGATT
TCAGTATTATTTCAGTAGCCGGCAAAGCTTTAGCTCCTGCAGATCTTATGGAGCATCACAGTGGTAGT
CAGGGTCCTTTACTGACCACTGGGGACTTAGGGAAAGAAAAGACTCAAAAGAGGGTAAAGGAAGGC
AATGGCACCAGTAATAGTACTCTCTCGGGGCCCGGATTAGACAGCAAACCAGGGAAGCGCAGTCGGA
CCCCTTCTAATGATGGGAAAAGCAAAGATAAGCCTCCAAAGCGGAAGAAGGCAGACACTGAGGGAA
AGTCTCCATCTCATAGTTCTTCTAACAGACCTTTTACCCCACCTACCAGTACAGGTGGATCTAAATCGC
CAGGCAGTGCAGGAAGATCTCAGACTCCCCCAGGTGTTGCCACACCACCCATTCCCAAAATCACTATT
CAGATTCCTAAGGGAACAGTGATGGTGGGCAAGCCTTCCTCTCACAGTCAGTATACCAGCAGTGGTTC
TGTGTCTTCCTCAGGCAGCAAAAGCCACCATAGCCATTCTTCCTCCTCTTCCTCATCTGCTTCCACCTC
AGGGAAGATGAAAAGCAGTAAATCAGAAGGTTCATCAAGTTCCAAGTTAAGTAGCAGTATGTATTCT
AGCCAGGGGTCTTCTGGATCTAGCCAGTCCAAAAATTCATCCCAGTCTGGGGGGAAGCCAGGCTCCTC
TCCCATAACCAAGCATGGACTGAGCAGTGGCTCTAGCAGCACCAAGATGAAACCTCAAGGAAAGCCA
TCATCACTTATGAATCCTTCTTTAAGTAAACCAAACATATCCCCTTCTCATTCAAGGCCACCTGGAGGC
TCTGACAAGCTTGCCTCTCCAATGAAGCCTGTTCCTGGAACTCCTCCATCCTCTAAAGCCAAGTCCCCT
ATCAGTTCAGGTTCTGGTGGTTCTCATATGTCTGGAACTAGTTCAAGCTCTGGCATGAAGTCATCTTCA
GGGTTAGGATCCTCAGGCTCGTTGTCCCAGAAAACTCCCCCATCATCTAATTCCTGTACGGCATCTTCC
TCCTCCTTTTCCTCAAGTGGCTCTTCCATGTCATCCTCTCAGAACCAGCATGGGAGTTCTAAAGGAAAA
TCTCCCAGCAGAAACAAGAAGCCGTCCTTGACAGCTGTCATAGATAAACTGAAGCATGGGGTTGTCA
CCAGTGGCCCTGGGGGTGAAGACCCACTGGACGGCCAGATGGGGGTGAGCACAAATTCTTCCAGCCA
TCCTATGTCCTCCAAACATAACATGTCAGGAGGAGAGTTTCAGGGCAAGCGTGAGAAAAGTGATAAA
GACAAATCAAAGGTTTCCACCTCCGGGAGTTCAGTGGATTCTTCTAAGAAGACCTCAGAGTCAAAAA
ATGTGGGGAGCACAGGTGTGGCAAAAATTATCATCAGTAAGCATGATGGAGGCTCCCCTAGCATTAA
AGCCAAAGTGACTTTGCAGAAACCTGGGGAAAGTAGTGGAGAAGGGCTTAGGCCTCAAATGGCTTCT
TCTAAAAACTATGGCTCTCCACTCATCAGTGGTTCCACTCCAAAGCATGAGCGTGGCTCTCCCAGCCA
TAGTAAGTCACCAGCATATACCCCCCAGAATCTGGACAGTGAAAGTGAGTCAGGCTCCTCCATAGCA
GAGAAATCTTATCAGAATAGTCCCAGCTCAGACGATGGTATCCGACCACTTCCAGAATACAGCACAG
AGAAACATAAGAAGCACAAAAAGGAAAAGAAGAAAGTAAAAGACAAAGATAGGGACCGAGACCGG
GACAAAGACCGAGACAAGAAAAAATCTCATAGCATCAAGCCAGAGAGTTGGTCCAAATCACCCATCT
CTTCAGACCAGTCCTTGTCTATGACAAGTAACACAATCTTATCTGCAGACAGACCCTCAAGGCTCAGC
CCAGACTTTATGATTGGGGAGGAAGATGATGATCTTATGGATGTGGCCCTGATTGGGAATTAGGAACC
TTATTTCCTAAAAGAAACAGGGCCAGAGGAAAAAAAACTATTGATAAGTTTATAGGCAAACCACCAT
AAGGGGTGAGTCAGACAGGTCTGATTTGGTTAAGAATCCTAAATGGCATGGCTTTGACATCAAGCTGG
GTGAATTAGAAAGGCATATCCAGACCCTATTAAAGAAACCACAGGGTTTGATTCTGGTTACCAGGAA
GTCTTCTTTGTTCCTGTGCCAGAAAGAAAGTTAAAATACTTGCTTAAGAAAGGGAGGGGGGTGGGAG
GGGTGTAGGGAGAGGGAAGGGAGGGAAACAGTTTTGTGGGAAATATTCATATATATTTTCTTCTCCCT
TTTTCCATTTTTAGGCCATGTTTTAAACTCATTTTAGTGCATGTATATGAAGGGCTGGGCAGAAAATGA
AAAAGCAATACATTCCTTGATGCATTTGCATGAAGGTTGTTCAACTTTGTTTGAGGTAGTTGTCCGTTT
GAGTCATGGGCAAATGAAGGACTTTGGTCATTTTGGACACTTAAGTAATGTTTGGTGTCTGTTTCTTAG
GAGTGACTGGGGGAGGGAAGATTATTTTAGCTATTTATTTGTAATATTTTAACCCTTTATCTGTTTGTT
TTTATACAGTGTTTCGTTCTAAATCTATGAGGTTTAGGGTTCAAAATGATGGAAGGCCGAAGAGCAAG
GCTTATATGGTGGTAGGGAGCTTATAGCTTGTGCTAATACTGTAGCATCAAGCCCAAGCAAATTAGTC
AGAGCCCGCCTTTAGAGTTAAATATAATAGAAAAACCAAAATGATATTTTTATTTTAGGAGGGTTTAA
ATAGGGTTCAGAGATCATAGGAATATTAGGAGTTACCTCTCTGTGGAGGTATTGACTTGTAATCTCAT
TTTCCTTTCAAAAAAAAAAAAAAAAGCTAAGGTGGCTTGTTGGGATGTAAACATGTTTTCAGATGCAG
TAAGGTTTAGTGTAGGACAGCCTTCCTGACCCAGTGGCATGAAAACCATTACAGGATTAATAGTTCTC
CTACTTCCACAATGTGCCAAAAGTCTGCATCCCAGCATTTTGTTTGCAGGAGAACTGATGCCATTCCTA
AGAGCTGGACTCACTGTTTCTCTTCATCACAAGGAGAAGGAGTCCAAACTTTAATCACTCCACTGTAT
GCTCCCTGAGATAAAACAGTAAAAAATCCGCAGCCATAGTTCACTTAAAACAATTTCAAGCTCACTTT
TGAAGTAATGGGGGCCTGGAATGCTAGGTGAGCATGAAGATAAACCCTTGCTACTATGTAGCAACCC
AATTGGACCTTTTTGGAGAAATAGGTCTGAGTCTGGATTCTGGGGGACATCAATAAGAGCCCTTCACA
TAAAAATATAGAAATCCAGGAGACTGTTTCGAGTGCAACAGAAGTTCTCAGTATTTGGAGGGTCCTCT
CAAAAATTCTGCGGCCTTACTTTGATATTGACACCTGCACTGTGCCATTCCTGATTATTCCATTCAGGA
TCTGTATCAGCGGGATGGGGCATGGTCCCCAGCACAACTCTTCTGGGTTAAAAAAAAAAAGCCAGGT
GATTCCTTTGTGTGTTATGTCGTAAGTGGAGTGACTTCATCATATATGGAAGAAGATTTCTATATTCAG
CTTTTTCTGCAGGTTGGAGTCAGCATAGAGTTGGAAAATCAGCTTTGGCTTTCTTTCCTGTCTCATTTC
CTCTAGTGTTCTCCTTTTTATTGTCATCAGCTCTCAACAACTCTGCCACTTTTGTGTCCCAAGGTAATAA
GATGTAGGAAACAAAACATTGTAAAGTGGAGCAAGAAAAGTTATCAATTAACCACATCAGAGTCAAA
TGTCTTGGGTGACACTAAGGAGGATATGGGCAGGTGATACCAGAGTGCTTTATCTTGTGATGTTGATA
CAGTAGCAGCCTCTCAGACATTCAGCCAGGTTGGATTTCTCATGAGTTTGTCACCTAGTTTTGAATCCT
ATCCCGTTGGTTTCTGCAGGAAAAAAAAAAAAATTTATGTGGTTTTTAAAATTTGTTCTGAGTGGGGA
GAATCTTAGGGGGAATGTACTGAATAGTATCATGGGCTCAGCTCCCCCATGCAGGGCCAACAAATAC
CAAAATGAGTAAACTGGGAAGCTTTTCTCTCTTTCTGTCTTCATCCCAGATCAAAGAATCCCGAGTTA
GGATCTGGATGAAGGATAAGCCCCTGAATTGTCGATGGGCTCACCCCCACACTGACCCAGCATCTGAA
CTTGCTTAACAGGGAGCCGGGGCTAAACTGCTTCACCCTGCCTGAGAACCAGGGAGCACTGCATTTCT
CCACAGGGTGGAGGAGAAGAGGCAGAATAAACCAAGCCTGGGACACCTCCCTCCTGTCTAGGTGTAC
TCATTCTTCTGTTTCAAAAGAAGGCAAGGACATGAAGTCAACTTCTACCTATCTTCTGCTGCTGGTGTC
TTATGTATTCTCAGTTTGACCTGATTCCTCTTCTGTCTTTTGACTTAACATTAGGGGTTCTTGGTCATAA
CCTGCTCTGATGTACATAAAGATTTCAGGTTCAATATCAATGTGTCTTAAAACAGAAGTATTTTAGCG
GGTGGGGGGTGGGGTGGTGGGGACAAACAACGCAGGATATAATTGCCAAAACCAGGCTTGAGGTTGG
TGACTCTTGAAAGATTTTCTTTCTTCAGGCCTAGATCAGAAAATTAAGTGCAGCAATATCATGAATTCT
CAGAAGCCCTTTCAGGGAGCCAGTGAGTCATACAGTATCCACAGTTGAGTCACTTAAAGATGTCAGTA
TACGAAACATTATTCACAATCCTTGGGCAATCTCATTTTTTTTTCCTTCTCCCCTCCTCCCCTGCCCCCC
ATACATTTCTATCCTTGAGTTAGTTTTGGAGGGGCAGGAAGTACTTAACATCTCAGAAGCTAGATTGG
GAAACATGCTCAGCTATAAGAACTGAGCTTTAAATTTTGAGTTTAAAAATGTACATCAGGAGCAGCTG
GGGAGGGTCTTTTTTTAAAAAAATCTTTCAAATTTGGTTTTCTGTGCATATGGCCGTTTTGTAAATACT
TTGGGGTTTTTCATTTTTTTGAAAGTAGATGAAATCTGTTGTGGGATTTTTTTCCCGAAACATTACAAA
ATAACCTGTTTATTTACATGCAAATAAACTTCTTTGATAAAAAGTAA

[0550] In some embodiments, oligonucleotides may have a region of complementarity to a mouse MED1 sequence, for example, as provided below by Gene ID: 19014; NCBI Ref. No: NM_001080118.1:

(SEQ ID NO: 815)
GATCTTTGGGAAGTTCCGTTGGGGAAGATGGCGGCGGCCGCGAGCACCCTTCTCTTCTTGCCGCCGGG
GACTTCAGACTGAGCCTTCCCCGGAAGAGTCGGGGCCGCTGGTGCGCCGCTTCCCCGGAGCCCAGGCT
AACTTGGTTCCCCTCTGAGTGGCGGGGAAAGGCTCCCCGGCTCGTGGCGGACCCAAGACCTCCCCGCT
GTCAGGATGAAGGCTCAGGGGGAAACCGAGGACTCAGAGAGGCTGAGTAAGATGAGCTCCCTCCTGG
AACGGCTCCATGCAAAATTTAACCAGAACAGACCTTGGAGTGAAACCATTAAGCTTGTGCGTCAAGT
AATGGAGAAGAGGGTCGTAATGAGTTCTGGAGGGCATCAGCATTTGGTCAGCTGTTTGGAGACATTG
CAGAAGGCTCTCAAAGTAACATCTTTGCCAGCAATGACTGATCGTTTGGAATCTATAGCCAGACAGAA
TGGACTGGGCTCTCACCTCAGTGCCAGTGGCACTGAGTGTTACATCACGTCAGATATGTTCTATGTGG
AAGTGCAGTTAGATCCTGCAGGACAGCTTTGTGATGTCAAAGTGGCTCACCATGGGGAGAATCCTGTG
AGCTGTCCAGAGCTTGTACAGCAGTTAAGGGAAAAGAATTTTGAGGAATTTTCCAAGCATCTTAAGGG
TCTTGTTAATCTGTATAATCTCCCAGGGGACAACAAACTGAAGACTAAAATGTATCTGGCTCTCCAAT
CCTTAGAACAGGACCTTTCTAAAATGGCTATTATGTACTGGAAGGCAACCAACGCCGCTCCCTTGGAT
AAGATTCTTCATGGAAGTGTTGGTTATCTCACCCCGCGGAGTGGGGGTCATTTAATGAATATGAAATA
CTATGCCTCTCCATCTGACCTGCTGGATGATAAGACTGCCTCTCCTATCATTTTGCATGAAAAGAATGT
TCCTCGGTCTTTGGGAATGAATGCCTCAGTGACAATTGAAGGAACCTCTGCTATGTACAAACTCCCAA
TTGCCCCATTAATTATGGGGTCACACCCAGCTGACAACAAATGGACCCCTTCTTTCTCCGCAGTCACTA
GTGCCAACAGTGTTGATCTTCCTGCGTGTTTCTTCTTGAAATTTCCCCAGCCAATTCCAGTATCTAAAG
CATTTGTTCAGAAACTGCAAAATTGCACAGGAATCCCGTTGTTTGAGACTCCGCCCACTTACCTGCCC
CTGTATGAACTCATCACTCAGTTTGAGCTGTCAAAGGATCCTGACCCTTTACCTTTGAATCACAACATG
CGATTTTACGCTGCTCTTCCAGGTCAGCAGCACTGCTATTTTCTCAATAAAGATGCTCCTCTTCCTGAT
GGTCAGAGCCTGCAGGGAACACTGGTCAGCAAAATCACCTTCCAGCACCCTGGCCGAGTTCCTCTTAT
CTTGAATATGATCAGACACCAAGTGGCCTATAACACTCTAATTGGAAGCTGTGTCAAAAGAACTATTT
TAAAAGAAGATTCTCCTGGGCTCCTCCAGTTTGAAGTGTGTCCTCTCTCAGAATCTCGCTTCAGTGTAT
CTTTTCAGCACCCTGTGAATGACTCCCTTGTGTGTGTGGTGATGGATGTGCAAGACTCAACACATGTG
AGCTGTAAACTCTACAAGGGGCTGTCAGATGCACTAATCTGTACAGACGACTTCATTGCCAAAGTTGT
TCAAAGATGTATGTCCATTCCTGTGACGATGAGGGCTATTCGGAGGAAGGCTGAAACCATACAGGCT
GACACCCCAGCACTGTCTCTCATTGCAGAGACAGTTGAAGACATGGTGAAAAAGAACCTGCCCCCGG
CTAGCAGCCCAGGGTATGGCATGACCACAGGCAACAACCCAATGAGTGGTACCACTACACCAACCAA
CACCTTTCCGGGGGGTCCCATTACCACCTTGTTTAATATGAGCATGAGCATCAAAGATCGGCATGAGT
CGGTGGGCCATGGGGAGGACTTCAGCAAGGTGTCTCAGAACCCAATTCTTACCAGTTTGTTGCAAATC
ACAGGGAACGGGGGGTCTACCATTGGCTCGAGTCCGACCCCTCCTCATCACACGCCGCCACCTGTCTC
TTCGATGGCCGGCAACACCAAGAACCACCCGATGCTCATGAACCTTCTTAAAGATAACCCTGCCCAGG
ATTTCTCAACCCTTTATGGAAGCAGCCCTTTAGAAAGGCAGAACTCCTCTTCCGGATCACCCCGGATG
GAAATGTGCTCGGGGAGCAACAAGGCCAAGAAGAAGAAGTCGTCAAGAGTCCCACCTGACAAACCC
AAGCACCAGACTGAAGACGATTTCCAGAGGGAGCTCTTTTCCATGGATGTCGACTCACAGAACCCTAT
GTTTGACGTCAGCATGACCGCTGACGCGCTGGATACACCTCATATCACCCCAGCTCCAAGCCAGTGTA
GCACTCCCCCAGCAACGTACCCACAGCCAGTGTCTCACCCCCAGCCCAGTATTCAGAGGATGGTCCGA
CTGTCCAGTTCAGACAGCATTGGCCCAGATGTAACTGATATTCTTTCAGATATTGCCGAAGAAGCTTC
AAAGCTTCCCAGCACGAGTGATGACTGCCCACCAATTGGCACCCCTGTTCGAGATTCCTCAAGTTCTG
GGCATTCTCAGAGTGCCCTCTTTGATTCTGATGTCTTTCAAACTAATAATAATGAAAATCCATACACTG
ATCCAGCTGACCTTATTGCAGATGCTGCTGGAAGCCCCAATAGTGATTCTCCTACCAATCATTTTTTCC
CTGATGGAGTAGATTTCAATCCTGATTTGTTGAACAGCCAAAGCCAAAGTGGTTTTGGAGAGGAGTAT
TTTGATGAAAGTAGTCAGAGTGGGGATAATGATGATTTCAAAGGATTTGCATCTCAGGCATTAAATAC
ATTGGGGATGCCAATGCTTGGAGGTGACAATGGGGAGCCAAAATTTAAGGGCAGCAGCCAGGCTGAC
ACGGTGGACTTCAGTATTATATCAGTAGCCGGTAAGGCTTTGGGTGCTGCAGATCTGATGGAGCACCA
CAGTGGGAGTCAGAGTCCTTTACTGACCACTGGAGAATTAGGGAAAGAAAAAACTCAAAAGAGGGTG
AAGGAAGGCAACGGCACAGGTGCTAGCAGTGGATCAGGTCCAGGGTCAGACAGCAAGCCAGGCAAG
CGCAGCCGCACTCCCTCCAATGATGGGAAGAGCAAGGATAAGCCTCCAAAGCGGAAGAAGGCAGAC
ACTGAGGGGAAGTCCCCATCTCACAGTTCTTCTAATAGACCTTTCACCCCACCTACCAGCACGGGTGG
GTCCAAATCCCCAGGCAGTTCAGGACGATCTCAGACGCCCCCAGGTGTTGCCACCCCGCCCATTCCCA
AGATTACCATTCAGATTCCTAAAGGGACAGTGATGGTGGGCAAGCCCTCCTCTCACAGTCAGTACACT
AGCAGTGGTTCTGTGTCTTCCTCTGGCAGCAAAAGCCACCATAGTCATTCTTCCTCCTCCTCTTCCTTA
GCTTCTGCTTCCACCTCAGGCAAGGTGAAAAGCAGTAAATCTGAAGGCTCATCAAGTTCCAAGCTCAG
TGGCAGTATGTATGCTAGCCAAGGGTCTTCTGGATCCAGCCAGTCCAAAAATTCATCTCAGACTGGGG
GGAAGCCAGGCTCCTCTCCCATTACCAAACATGGACTGAGCAGTGGGTCCAGCAGTACCAAGATGAA
ACCTCAAGGCAAGCCATCCTCCCTTATGAACCCTTCTATAAGTAAGCCAAACATATCCCCTTCCCATTC
AAGGCCTCCCGGAGGCTCAGATAAGCTTGCCTCTCCAATGAAGCCTGTTCCTGGAACCCCCCCATCCT
CTAAAGCCAAGTCCCCTATCAGTTCAGGTTCCAGTGGTTCTCATGTGTCAGGAACTAGTTCAAGCTCT
GGTATGAAGTCATCTTCAGGGTCAGCATCCTCAGGCTCAGTGTCTCAAAAAACCCCTCCAGCATCTAA
TTCTTGTACACCATCTTCCTCTTCGTTTTCCTCAAGTGGTTCTTCCATGTCATCCTCTCAGAATCAACAT
GGCAGTTCCAAAGGGAAATCTCCCAGTAGGAATAAGAAGCCTTCCTTGACAGCTGTCATAGATAAATT
GAAGCATGGGGTGGTTACCAGTGGGCCTGGGGGTGAGGATCCAATAGACAGTCAGATGGGCGCAAGC
ACAAATTCTTCTAACCATCCCATGTCCTCCAAACATAACACGTCAGGAGGGGAGTTCCAGAGCAAACG
TGAGAAAAGTGATAAAGACAAATCCAAGGTCTCTGCTTCTGGGGGGTCAGTGGATTCCTCTAAGAAG
ACTTCAGAGTCAAAAAATGTGGGGAGCACGGGGGTGGCAAAAATCATTATCAGCAAGCACGACGGA
GGCTCCCCGAGCATCAAAGCCAAAGTGACGCTACAGAAACCTGGAGAAAGTGGTGGAGATGGGCTCA
GGCCACAGATAGCCTCATCAAAGAACTATGGCTCTCCACTTATCAGTGGTTCCACTCCAAAGCACGAA
CGGGGTTCTCCCAGCCACAGTAAGTCGCCAGCATATACACCACAGAATGTGGACAGTGAAAGTGAGT
CAGGCTCCTCCATAGCAGAGAGATCCTACCAGAACAGTCCCAGCTCAGAGGATGGTATCCGACCACTT
CCAGAGTACAGCACTGAGAAGCATAAGAAGCACAAAAAGGAAAAGAAGAAAGTCAGAGACAAAGA
CAGAGACAAGAAGAAGTCTCACAGCATGAAGCCAGAGAACTGGTCGAAATCCCCCATTTCTTCAGAT
CCGACGGCGTCTGTGACAAATAACCCTATCTTATCTGCAGACAGGCCTTCTAGGCTCAGCCCTGACTT
CATGATTGGGGAGGAAGATGATGATCTCATGGATGTGGCCCTGATTGGCAATTAGCCTAACTTTCTAA
ACAGACACGTCCAGAGGAGAAACTAATGATATATGTAAACCAACCCGAGGGGTGAGTCAGACAGGCC
CTGTCAGTGCTTAAGAGCCCTAAAGGGCATGGCCTCTACACCAAGCTGGGTACATTTATAAACATACA
TCTAGACCCTGCTGCCGAAACCATGTGGTTGGTTGTTCAGAAACAAGTCATATTTCTTTGCCAGAAAG
CAATGAATAAATTACTTGCTTAAGGGGAGAGGGGTGGTGGGAGAGGGTGTAGAGAGGGAGGGGTGG
GAAATTGTTGTGGGAAATATTCATATATTTTTCTCCCTTTTTCCATTTTCAGGACATGCTTTAAACTCAT
TTTAGTGCATGTATTTGAAGGGCTGGGCAGAAAATGAAAAAGCAATACATTCCTTGATGCATTCGCAT
GAAGGTTGCTCACCTGTGGGAGATGCCCATTGGAAGCATGGGCACGGGAAGGACTTTGACAGTTCTG
GACACTGAAAGCAATGTTTGGTGTCTGTTTCTTAGGAGTGATGGGGGAGGGAAAATTATTTTAGTTAT
TTATTTGTAATATTTTAATCCTTGATGTTTGTTTTTATGCAATGTTTGTTCCTAAATCTATGAAGGTTAT
GGTTCAGAACAGTAGGAGGCAGGTAGCAAGGCTCGCCTGGTGGGGAGCTCGCAGCCTGTGCTGACGC
TGCAGCACCAGTCCCACAGAGCTAATCACAGCCTGTCTTTGGAGTTGAATAGAAAAACCAAAACTATT
ATCTTTGGAGGTTTTTCACAGGGTTCAGACACCATAGGAATATTAGGAGTGAGTTACCTCCCTATGCA
GATAAAAGATTTATCTTCTTTCATTAAAAAGGAAGGGTGGCTTTGGGGGGTATACATTTGTTTTCAGA
GTCTATACCCTATCGTATAAAAATCAGTATAGAATTAATAGTTCTCCTACTTCCACAATGTGCCAAAA
GTCTACATCCCAGCATTTTGTTTGCAGGAGAGCTGATGCCATTCCTAAGAGCTGGACTCTTTGTTTCTC
TTCATCACAAGAAGAAGGAGTTCAGACTTAAATCACTCCACTGTATGCTCCCCGAGATAAACAGTTAA
AAAAAAAAAAAGCAGCCATAGTTCACTTAAAACAATTTCAAGCTCACTTGAAGTGATTAGGGCCTGG
AATGCTAAGTGAGCATGAAGATAACCCTTGCTACCGTGTAGCACACAGTCGGACCTTTTTGGAGAAAC
AGGTCTGAGTCTGGATTCTGAGGGACATCAAAGGAAGACCTCATAAATAGAGAAATGCAGGAGACCG
TTTTGAGTGCAACAGAAGTTCTCAGTATTTGGAGGGTCCTCTCAAAAGTCCGCGGCCTTACTTTGATTT
CACCACCTGCACTGTGCCATTCCTGATGATTCCGTTTGGGATCTGTATCAGCGGGGTGGGGGTGGGGC
GTGATCCCCAGCACAACTCTTCTGGATTACAAAACAAGCAAAAGCCAGGTGATTCATGTTTGTGTGTG
TTATAAGTGGAGTGACTTCATCAGATACGGACGATTTCTACATCCAACACTGCAGGTTGTTGGAGTTA
GCAT

[0551] In some embodiments, the oligonucleotide may have region of complementarity to a mutant form of MED1.

[0552] In some embodiments, an oligonucleotide comprises a region of complementarity to a MED1 sequence as set forth in SEQ ID NO: 814 or SEQ ID NO: 815. In some embodiments, the oligonucleotide comprises a region of complementarity that is at least 80%, 85%, 90%, 95%, 96%, 97%, 98%, 99%, or 100% complementary to an a MED1 sequence as set forth in SEQ ID NO: 814 or SEQ ID NO: 815. In some embodiments, the oligonucleotide comprises a sequence that has at least 10, 11, 12, 13, 14, 15, 16, 17, 18, or 19 consecutive nucleotides that are perfectly complementary to a MED1 sequence as set forth in SEQ ID NO: 814 or SEQ ID NO: 815. In some embodiments, an oligonucleotide may comprise a sequence that targets (e.g., is complementary to) an RNA version (i.e., wherein the T's are replaced with U's) of a MED1 sequence as set forth in SEQ ID NO: 814 or SEQ ID NO: 815. In some embodiments, the oligonucleotide comprises a sequence that is complementary (e.g., at least 80%, 85%, 90%, 95%, 96%, 97%, 98%, 99%, or 100% complementary) to an RNA version of a MED1 sequence as set forth in SEQ ID NO: 814 or SEQ ID NO: 815. In some embodiments, the oligonucleotide comprises a sequence that has at least 10, 11, 12, 13, 14, 15, 16, 17, 18, or 19 consecutive nucleotides that are perfectly complementary to an RNA version of a MED1 sequence as set forth in SEQ ID NO: 814 or SEQ ID NO: 815.

[0553] In some embodiments, a MED1-targeting oligonucleotide comprises an antisense strand that comprises at least 10, 11, 12, 13, 14, 15, 16, 17, 18, or 19 consecutive nucleotides of a sequence comprising any one of SEQ ID NOs: 864-887. In some embodiments, a MED1-targeting oligonucleotide comprises an antisense strand that comprises any one of SEQ ID NOs: 864-887. In some embodiments, a MED1-targeting oligonucleotide comprises an antisense strand that comprises shares at least 70%, 75%, 80%, 85%, 90%, 95%, or 97% sequence identity with at least 12 or at least 15 consecutive nucleotides of any one of SEQ ID NOs: 864-887.

[0554] In some embodiments, a MED1-targeting oligonucleotide comprises an antisense strand that targets a MED1 sequence comprising any one of SEQ ID NOs: 816-863. In some embodiments, an oligonucleotide comprises an antisense strand comprising at least 10, 11, 12, 13, 14, 15, 16, 17, 18, or 19 nucleotides (e.g., consecutive nucleotides) that are complementary to a MED1 sequence comprising any one of SEQ ID NOs: 816-863. In some embodiments, a MED1-targeting oligonucleotide comprises an antisense strand comprising a sequence that is at least 70%, 75%, 80%, 85%, 90%, 95%, or 97% complementary with at least 12 or at least 15 consecutive nucleotides of any one of SEQ ID NOs: 816-863.

[0555] In some embodiments, a MED1-targeting oligonucleotide comprises an antisense strand comprises a region of complementarity to a target sequence as set forth in any one of SEQ ID NOs: 816-863. In some embodiments, the region of complementarity is at least 8, at least 9, at least 10, at least 11, at least 12, at least 13, at least 14, at least 15, at least 16, at least 17, or at least 19 nucleotides in length. In some embodiments, the region of complementarity is 8, 9, 10, 11, 12, 13, 14, 15, 16, 17, 18, or 19 nucleotides in length. In some embodiments, the region of complementarity is in the range of 8 to 20, 10 to 20 or 15 to 20 nucleotides in length. In some embodiments, the region of complementarity is fully complementary with all or a portion of its target sequence. In some embodiments, the region of complementarity includes 1, 2, 3 or more mismatches.

[0556] In some embodiments, a MED1-targeting oligonucleotide further comprises a sense strand that hybridizes to the antisense strand to form a double stranded siRNA. In some embodiments, the MED1-targeting oligonucleotide comprises an antisense strand that comprises the nucleotide sequence of any one of SEQ ID NOs: 864-887. In some embodiments, the MED1-targeting oligonucleotide further comprises a sense strand that comprises the nucleotide sequence of any one of SEQ ID NOs: 840-863.

[0557] In some embodiments, the MED1-targeing oligonucleotide is a double stranded oligonucleotide (e.g., an siRNA) comprising an antisense strand that comprises the nucleotide sequence of any one of SEQ ID NOs: 864-887 and a sense strand that hybridizes to the antisense strand and comprises the nucleotide sequence of any one of SEQ ID NOs: 840-863, wherein the antisense strand and/or (e.g., and) comprises one or more modified nucleosides (e.g., 2′-modified nucleosides). In some embodiment, the one or more modified nucleosides are selected from 2′-O-Me and 2′-F modified nucleosides.

[0558] In some embodiments, the MED1-targeing oligonucleotide is a double stranded oligonucleotide (e.g., an siRNA) comprising an antisense strand that comprises the nucleotide sequence of any one of SEQ ID NOs: 864-887 and a sense strand that hybridizes to the antisense strand and comprises the nucleotide sequence of any one of SEQ ID NOs: 840-863, wherein the each nucleoside in the antisense strand and/or (e.g., and) each nucleoside in the sense strand is a 2′-modified nucleoside selected from 2′-O-Me and 2′-F modified nucleosides.

[0559] In some embodiments, the MED1-targeing oligonucleotide is a double stranded oligonucleotide (e.g., an siRNA) comprising an antisense strand that comprises the nucleotide sequence of any one of SEQ ID NOs: 864-887 and a sense strand that hybridizes to the antisense strand and comprises the nucleotide sequence of any one of SEQ ID NOs: 840-863, wherein the each nucleoside in the antisense strand and each nucleoside in the sense strand is a 2′-modified nucleoside selected from 2′-O-Me and 2′-F modified nucleosides, and wherein the antisense strand and/or (e.g., and) the sense strand each comprises one or more phosphorothioate internucleoside linkages. In some embodiments, the sense strand does not comprise any phosphorothioate internucleoside linkages (all the internucleoside linkages in the sense strand are phosphodiester internucleoside linkages), and the antisense strand comprises 1, 2, or 3 phosphorothioate internucleoside linkages. In some embodiments, the antisense strand comprises 2 phosphorothioate internucleoside linkages, optionally wherein the two internucleoside linkages at the 3′ end of the antisense strand are phosphorothioate internucleoside linkages and the rest of the internucleoside linkages in the antisense strand are phosphodiester internucleoside linkages,

[0560] In some embodiments, the antisense strand of the MED1-targeing oligonucleotide comprises a structure of (5′ to 3′): fNfNmNfNmNfNmNfNmNfNmNfNmNfNmNfNmNfNmNfNmN*fN*mN, wherein “mN” indicates 2′-O-methyl (2′-O-Me) modified nucleosides; “fN” indicates 2′-fluoro (2′-F) modified nucleosides; “*” indicates phosphrothioate internucleoside linkage; and the absence of “*” between two nucleosides indicate phosphodiester internucleoside linkage.

[0561] In some embodiments, the sense strand of the MED1-targeing oligonucleotide comprises a structure of (5′ to 3′): mNmNfNmNfNmNfNmNfNmNfNmNfNmNfNmNfNmNfNmNfN, wherein “mN” indicates 2′-O-methyl (2′-O-Me) modified nucleosides; “fN” indicates 2′-fluoro (2′-F) modified nucleosides; and the absence of “*” between two nucleosides indicate phosphodiester internucleoside linkage.

[0562] In some embodiments, the antisense strand of the MED1-targeing oligonucleotide is selected from the modified version of SEQ ID NOs: 864-887 listed in Table 34. In some embodiments, the sense strand of the MED1-targeing oligonucleotide is selected from the modified version of SEQ ID NOs: 840-863 listed in Table 34. In some embodiments, the MED1-targeing oligonucleotide is a siRNA selected from the siRNAs listed in Table 34.

TABLE 32
MED1 Target Sequences

| Reference | | | |
|---|---|---|---|
| sequence | Corresponding | | |
| NM_004774.4 | nucleotides of the | MED1 Target Sequence | SEQ ID |
| (SEQ ID NO: 814) | Reference Sequence | (5’ to 3’) | NO: |
| NM_004774.4 | 503-521 | GTTACATCACGTCAGATAT | 816 |
| NM_004774.4 | 508-526 | ATCACGTCAGATATGTTCT | 817 |
| NM_004774.4 | 515-533 | CAGATATGTTCTATGTGGA | 818 |
| NM_004774.4 | 1432-1450 | ATCAGACACCAAGTGGCCT | 819 |
| NM_004774.4 | 1676-1692 | ACTTCATTGCCAAAGTTGT | 820 |
| NM_004774.4 | 1688-1706 | AAGTTGTTCAAAGATGTAT | 821 |
| NM_004774.4 | 1693-1711 | GTTCAAAGATGTATGTCCA | 822 |
| NM_004774.4 | 1837-1855 | CCAGGGTATGGCATGACCA | 823 |
| NM_004774.4 | 1923-1941 | CTTGTTTAATATGAGCATG | 824 |
| NM_004774.4 | 2126-2144 | ACCCGATGCTCATGAACCT | 825 |
| NM_004774.4 | 2786-2804 | GAGTAGATTTCAATCCTGA | 826 |
| NM_004774.4 | 3454-3472 | AGCAGTGGTTCTGTGTCTT | 827 |
| NM_004774.4 | 2005-2023 | CCAATTCTTACCAGTTTGT | 828 |
| NM_004774.4 | 1978-1996 | GAGGACTTCAGCAAGGTGT | 829 |
| NM_004774.4 | 4601-4619 | CAGGCTCCTCCATAGCAGA | 830 |
| NM_004774.4 | 5482-5500 | GTGTCTGTTTCTTAGGAGT | 831 |
| NM_004774.4 | 400-418 | AAGGCTCTCAAAGTAACAT | 832 |
| NM_004774.4 | 1940-1958 | TGAGCATCAAAGATCGGCA | 833 |
| NM_004774.4 | 5363-5381 | GCAATACATTCCTTGATGC | 834 |
| NM_004774.4 | 6157-6175 | AAAACAATTTCAAGCTCAC | 835 |
| NM_004774.4 | 1937-1955 | GCATGAGCATCAAAGATCG | 836 |
| NM_004774.4 | 995-1013 | TGTACAAACTCCCAATTGC | 837 |
| NM_004774.4 | 4600-4618 | TCAGGCTCCTCCATAGCAG | 838 |
| NM_004774.4 | 5483-5501 | TGTCTGTTTCTTAGGAGTG | 839 |

*The target sequences contain Ts, but binding to RNA and/or DNA is contemplated.

[0563] In some embodiments, an oligonucleotide may comprise or consist of any sequence as provided in Table 33.

TABLE 33
Oligonucleotide sequences for targeting MED1

| Passenger Strand/ | | Guide Strand/ | |
|---|---|---|---|
| Sense Strand | SEQ ID | Antisense Strand | SEQ ID |
| (RNA) (5’ to 3’) | NO: | (RNA) (5’ to 3’) | NO: |
| AUGUUACAUCACGUCAGAUAU | 840 | AUAUCUGACGUGAUGUAACAUUC | 864 |
| ACAUCACGUCAGAUAUGUUCU | 841 | AGAACAUAUCUGACGUGAUGUAA | 865 |
| GUCAGAUAUGUUCUAUGUGGA | 842 | UCCACAUAGAACAUAUCUGACGU | 866 |
| UGAUCAGACACCAAGUGGCCU | 843 | AGGCCACUUGGUGUCUGAUCAGA | 867 |
| UGACUUCAUUGCCAAAGUUGU | 844 | ACAACUUUGGCAAUGAAGUCAUC | 868 |
| CAAAGUUGUUCAAAGAUGUAU | 845 | AUACAUCUUUGAACAACUUUGGC | 869 |
| UUGUUCAAAGAUGUAUGUCCA | 846 | UGGACAUACAUCUUUGAACAACU | 870 |
| GCCCAGGGUAUGGCAUGACCA | 847 | UGGUCAUGCCAUACCCUGGGCUG | 871 |
| ACCUUGUUUAAUAUGAGCAUG | 848 | CAUGCUCAUAUUAAACAAGGUGG | 872 |
| CCACCCGAUGCUCAUGAACCU | 849 | AGGUUCAUGAGCAUCGGGUGGUU | 873 |
| UGGAGUAGAUUUCAAUCCUGA | 850 | UCAGGAUUGAAAUCUACUCCAUC | 874 |
| CCAGCAGUGGUUCUGUGUCUU | 851 | AAGACACAGAACCACUGCUGGUA | 875 |
| ACCCAAUUCUUACCAGUUUGU | 852 | ACAAACUGGUAAGAAUUGGGUUC | 876 |
| GGGAGGACUUCAGCAAGGUGU | 853 | ACACCUUGCUGAAGUCCUCCCCA | 877 |
| GUCAGGCUCCUCCAUAGCAGA | 854 | UCUGCUAUGGAGGAGCCUGACUC | 878 |
| UGGUGUCUGUUUCUUAGGAGU | 855 | ACUCCUAAGAAACAGACACCAAA | 879 |
| AGAAGGCUCUCAAAGUAACAU | 856 | AUGUUACUUUGAGAGCCUUCUGC | 880 |
| CAUGAGCAUCAAAGAUCGGCA | 857 | UGCCGAUCUUUGAUGCUCAUGCU | 881 |
| AAGCAAUACAUUCCUUGAUGC | 858 | GCAUCAAGGAAUGUAUUGCUUUU | 882 |
| UUAAAACAAUUUCAAGCUCAC | 859 | GUGAGCUUGAAAUUGUUUUAAGU | 883 |
| GAGCAUGAGCAUCAAAGAUCG | 860 | CGAUCUUUGAUGCUCAUGCUCAU | 884 |
| UGUGUACAAACUCCCAAUUGC | 861 | GCAAUUGGGAGUUUGUACACAGC | 885 |
| AGUCAGGCUCCUCCAUAGCAG | 862 | CUGCUAUGGAGGAGCCUGACUCA | 886 |
| GGUGUCUGUUUCUUAGGAGUG | 863 | CACUCCUAAGAAACAGACACCAA | 887 |

[0564] In some embodiments, an oligonucleotide is a modified oligonucleotide as provided in Table 34, wherein ‘mN’ represents a 2′-O-methyl modified nucleoside (e.g., mU is 2′-O-methyl modified uridine), ‘fN’ represents a 2′-fluoro modified nucleoside (e.g., fU is 2′-fluoro modified uridine), ‘*’ represents a phosphorothioate internucleoside linkage, and lack of “*” between nucleosides indicate phosphodiester internucleoside linkage.

TABLE 34
Modified Oligonucleotides for targeting MED1

| | Modified Passenger | | Modified Guide Strand/ | |
|---|---|---|---|---|
| | Strand/Sense Strand | SEQ ID | Antisense Strand | SEQ ID |
| siRNA # | (RNA) (5’ to 3’) | NO: | (RNA) (5’ to 3’) | NO: |
| hsMED1-1 | mAmUfGmUfUmAfCmAfU | 840 | fAfUmAfUmCfUmGfAmCfGmUfG | 864 |
| | mCfAmCfGmUfCmAfGmAf | | mAfUmGfUmAfAmCfAmU*fU*mC | |
| | UmAfU | | | |
| hsMED1-2 | mAmCfAmUfCmAfCmGfU | 841 | fAfGmAfAmCfAmUfAmUfCmUfG | 865 |
| | mCfAmGfAmUfAmUfGmU | | mAfCmGfUmGfAmUfGmU*fA*mA | |
| | fUmCfU | | | |
| hsMED1-3 | mGmUfCmAfGmAfUmAfU | 842 | fUfCmCfAmCfAmUfAmGfAmAfC | 866 |
| | mGfUmUfCmUfAmUfGmU | | mAfUmAfUmCfUmGfAmC*fG*mU | |
| | fGmGfA | | | |
| hsMED1-4 | mUmGfAmUfCmAfGmAfC | 843 | fAfGmGfCmCfAmCfUmUfGmGfU | 867 |
| | mAfCmCfAmAfGmUfGmGf | | mGfUmCfUmGfAmUfCmA*fG*mA | |
| | CmCfU | | | |
| hsMED1-5 | mUmGfAmCfUmUfCmAfU | 844 | fAfCmAfAmCfUmUfUmGfGmCfA | 868 |
| | mUfGmCfCmAfAmAfGmUf | | mAfUmGfAmAfGmUfCmA*fU*mC | |
| | UmGfU | | | |
| hsMED1-6 | mCmAfAmAfGmUfUmGfU | 845 | fAfUmAfCmAfUmCfUmUfUmGfA | 869 |
| | mUfCmAfAmAfGmAfUmG | | mAfCmAfAmCfUmUfUmG*fG*mC | |
| | fUmAfU | | | |
| hsMED1-7 | mUmUfGmUfUmCfAmAfA | 846 | fUfGmGfAmCfAmUfAmCfAmUfC | 870 |
| | mGfAmUfGmUfAmUfGmU | | mUfUmUfGmAfAmCfAmA*fC*mU | |
| | fCmCfA | | | |
| hsMED1-8 | mGmCfCmCfAmGfGmGfU | 847 | fUfGmGfUmCfAmUfGmCfCmAfU | 871 |
| | mAfUmGfGmCfAmUfGmA | | mAfCmCfCmUfGmGfGmC*fU*mG | |
| | fCmCfA | | | |
| hsMED1-9 | mAmCfCmUfUmGfUmUfU | 848 | fCfAmUfGmCfUmCfAmUfAmUfU | 872 |
| | mAfAmUfAmUfGmAfGmC | | mAfAmAfCmAfAmGfGmU*fG*mG | |
| | fAmUfG | | | |
| hsMED1-10 | mCmCfAmCfCmCfGmAfU | 849 | fAfGmGfUmUfCmAfUmGfAmGfC | 873 |
| | mGfCmUfCmAfUmGfAmAf | | mAfUmCfGmGfGmUfGmG*fU*mU | |
| | CmCfU | | | |
| hsMED1-11 | mUmGfGmAfGmUfAmGfA | 850 | fUfCmAfGmGfAmUfUmGfAmAfA | 874 |
| | mUfUmUfCmAfAmUfCmCf | | mUfCmUfAmCfUmCfCmA*fU*mC | |
| | UmGfA | | | |
| hsMED1-12 | mCmCfAmGfCmAfGmUfG | 851 | fAfAmGfAmCfAmCfAmGfAmAfC | 875 |
| | mGfUmUfCmUfGmUfGmU | | mCfAmCfUmGfCmUfGmG*fU*mA | |
| | fCmUfU | | | |
| hsMED1-13 | mAmCfCmCfAmAfUmUfC | 852 | fAfCmAfAmAfCmUfGmGfUmAfA | 876 |
| | mUfUmAfCmCfAmGfUmUf | | mGfAmAfUmUfGmGfGmU*fU*mC | |
| | UmGfU | | | |
| hsMED1-14 | mGmGfGmAfGmGfAmCfU | 853 | fAfCmAfCmCfUmUfGmCfUmGfA | 877 |
| | mUfCmAfGmCfAmAfGmGf | | mAfGmUfCmCfUmCfCmC*fC*mA | |
| | UmGfU | | | |
| hsMED1-15 | mGmUfCmAfGmGfCmUfC | 854 | fUfCmUfGmCfUmAfUmGfGmAfG | 878 |
| | mCfUmCfCmAfUmAfGmCf | | mGfAmGfCmCfUmGfAmC*fU*mC | |
| | AmGfA | | | |
| hsMED1-16 | mUmGfGmUfGmUfCmUfG | 855 | fAfCmUfCmCfUmAfAmGfAmAfA | 879 |
| | mUfUmUfCmUfUmAfGmG | | mCfAmGfAmCfAmCfCmA*fA*mA | |
| | fAmGfU | | | |
| hsMED1-17 | mAmGfAmAfGmGfCmUfC | 856 | fAfUmGfUmUfAmCfUmUfUmGfA | 880 |
| | mUfCmAfAmAfGmUfAmA | | mGfAmGfCmCfUmUfCmU*fG*mC | |
| | fCmAfU | | | |
| hsMED1-18 | mCmAfUmGfAmGfCmAfU | 857 | fUfGmCfCmGfAmUfCmUfUmUfG | 881 |
| | mCfAmAfAmGfAmUfCmGf | | mAfUmGfCmUfCmAfUmG*fC*mU | |
| | GmCfA | | | |
| hsMED1-19 | mAmAfGmCfAmAfUmAfC | 858 | fGfCmAfUmCfAmAfGmGfAmAfU | 882 |
| | mAfUmUfCmCfUmUfGmAf | | mGfUmAfUmUfGmCfUmU*fU*mU | |
| | UmGfC | | | |
| hsMED1-20 | mUmUfAmAfAmAfCmAfA | 859 | fGfUmGfAmGfCmUfUmGfAmAfA | 883 |
| | mUfUmUfCmAfAmGfCmUf | | mUfUmGfUmUfUmUfArnA*fG*m | |
| | CmAfC | | U | |
| hsMED1-21 | mGmAfGmCfAmUfGmAfG | 860 | fCfGmAfUmCfUmUfUmGfAmUfG | 884 |
| | mCfAmUfCmAfAmAfGmAf | | mCfUmCfAmUfGmCfUmC*fA*mU | |
| | UmCfG | | | |
| hsMED1-22 | mUmGfUmGfUmAfCmAfA | 861 | fGfCmAfAmUfUmGfGmGfAmGfU | 885 |
| | mAfCmUfCmCfCmAfAmUf | | mUfUmGfUmAfCmAfCmA*fG*mC | |
| | UmGfC | | | |
| hsMED1-23 | mAmGfUmCfAmGfGmCfU | 862 | fCfUmGfCmUfAmUfGmGfAmGfG | 886 |
| | mCfCmUfCmCfAmUfAmGf | | mAfGmCfCmUfGmAfCmU*fC*mA | |
| | CmAfG | | | |
| hsMED1-24 | mGmGfUmGfUmCfUmGfU | 863 | fCfAmCfUmCfCmUfAmAfGmAfA | 887 |
| | mUfUmCfUmUfAmGfGmA | | mAfCmAfGmAfCmAfCmC*fA*mA | |
| | fGmUfG | | | |

[0565] k. MED13 Oligonucleotides

[0566] Examples of oligonucleotides useful for targeting MED13 are provided in Xu, M. et al. “MicroRNA-499-5p regulates skeletal myofiber specification via NFATc1/MEF2C pathway and Thrap1/MEF2C axis” Life Sci. 2018, 215:236-245.; and Grueter, C. E., et al. “A cardiac microRNA governs systemic energy homeostasis by regulation of MED13” Cell. 2012, 149(3):671-83.; the contents of each of which are incorporated herein in their entireties.

[0567] In some embodiments, oligonucleotides may have a region of complementarity to a human MED13 sequence, for example, as provided below by Gene ID: 9969; NCBI Ref. No: NM_005121.3:

(SEQ ID NO: 888)
CTCTCTCTGGTCGGAGGCGGCGGTAATGGCGGATGGTGGGTTGTGGCGCCGGCGGCGGCTGCTGTGA
GGGACGATGAGTGCCTCCTTCGTGCCGAACGGGGCCAGCCTGGAAGATTGTCACTGTAACCTCTTCTG
CCTGGCTGACTTGACAGGAATTAAGTGGAAAAAATATGTATGGCAAGGCCCAACTTCTGCCCCTATTC
TGTTTCCTGTGACAGAAGAAGACCCCATTTTGAGCAGTTTTAGTCGCTGCCTTAAGGCAGATGTACTT
GGTGTTTGGCGGCGAGATCAAAGACCTGGAAGAAGAGAATTGTGGATATTTTGGTGGGGTGAAGACC
CCAGTTTTGCTGACCTTATTCACCATGACTTATCAGAAGAAGAAGATGGAGTGTGGGAGAATGGACTT
TCCTATGAATGCCGTACTCTGCTTTTCAAAGCAGTTCACAATCTATTGGAACGGTGTTTAATGAACAG
GAATTTTGTACGTATTGGCAAGTGGTTTGTAAAGCCTTATGAAAAAGATGAAAAACCTATAAATAAAA
GTGAACACTTGTCCTGCTCCTTCACCTTTTTCTTGCATGGAGACAGCAATGTTTGTACCAGTGTGGAAA
TTAACCAACATCAACCTGTATACCTTCTCAGTGAAGAGCATATCACCCTTGCTCAACAGTCTAATAGC
CCATTTCAAGTTATCTTATGCCCATTTGGACTAAATGGCACTCTCACAGGACAGGCATTCAAGATGTCT
GATTCAGCTACAAAAAAATTAATTGGTGAATGGAAACAGTTCTATCCTATCTCATGTTGCTTGAAGGA
GATGTCTGAAGAAAAACAGGAAGATATGGATTGGGAAGATGATTCTTTAGCTGCAGTAGAAGTTCTT
GTTGCTGGTGTCCGAATGATCTACCCAGCATGCTTTGTTCTAGTCCCTCAGTCAGACATTCCTACTCCT
AGCCCTGTGGGATCCACTCACTGTTCATCTTCTTGCTTGGGTGTCCACCAAGTGCCTGCTTCCACAAGA
GATCCTGCTATGTCTTCGGTTACGCTTACACCACCTACGTCTCCTGAGGAAGTCCAAACAGTTGATCCT
CAGTCTGTCCAGAAGTGGGTCAAATTTTCTTCAGTATCTGATGGCTTCAACTCCGATAGTACTAGCCAC
CATGGTGGGAAAATACCCAGAAAATTAGCAAATCATGTGGTGGATAGAGTTTGGCAAGAATGCAATA
TGAACAGAGCACAGAACAAGAGGAAGTATTCTGCTTCATCAGGTGGTCTATGCGAAGAAGCGACAGC
TGCTAAAGTGGCATCCTGGGATTTTGTTGAAGCCACACAAAGAACAAATTGCAGTTGTTTGAGGCACA
AAAATCTCAAGTCAAGAAATGCTGGACAACAAGGACAGGCACCATCTTTAGGTCAGCAACAACAAAT
ACTTCCTAAGCACAAGACCAATGAGAAGCAAGAAAAGAGTGAAAAGCCACAGAAACGCCCCTTGACT
CCTTTTCACCATCGTGTGTCTGTTAGTGATGATGTTGGCATGGACGCAGATTCAGCCAGCCAAAGACT
TGTGATCTCTGCTCCAGACAGTCAAGTGAGATTTTCAAATATCCGAACTAATGATGTAGCAAAGACTC
CTCAGATGCATGGCACCGAAATGGCAAATTCACCTCAACCACCCCCACTTAGTCCTCACCCTTGTGAT
GTGGTTGATGAAGGAGTGACTAAAACACCTTCAACTCCTCAGAGTCAACATTTTTATCAAATGCCAAC
ACCAGATCCCTTGGTTCCTTCTAAACCAATGGAAGATAGGATAGACAGTTTGTCCCAGTCTTTCCCAC
CTCAATATCAGGAAGCTGTAGAACCTACAGTATATGTTGGTACAGCAGTAAACTTGGAAGAAGATGA
AGCCAATATAGCCTGGAAGTATTACAAGTTCCCAAAGAAAAAAGATGTAGAGTTTTTACCACCTCAAC
TTCCAAGTGATAAATTCAAGGATGATCCAGTTGGACCTTTTGGACAGGAAAGTGTAACATCAGTTACA
GAGTTAATGGTGCAATGTAAGAAACCTTTAAAAGTTTCTGATGAATTAGTGCAGCAATATCAAATTAA
AAACCAGTGTCTTTCAGCAATAGCATCTGATGCAGAACAAGAACCTAAAATTGATCCATATGCATTTG
TTGAAGGAGATGAGGAATTCCTTTTTCCTGATAAAAAAGATAGACAAAATAGTGAGAGAGAAGCTGG
AAAAAAACACAAGGTAGAAGATGGGACATCTAGTGTAACAGTGTTATCACATGAAGAAGATGCTATG
TCATTATTTAGTCCCTCTATCAAGCAAGATGCTCCACGCCCTACTAGTCATGCCCGTCCTCCATCAACA
AGTTTGATTTATGACTCAGACCTGGCTGTCTCTTATACTGACCTTGATAATCTCTTCAATTCTGATGAA
GATGAACTAACACCTGGATCTAAAAAATCAGCAAATGGATCAGATGATAAAGCCAGCTGCAAGGAAT
CAAAGACAGGAAATCTGGACCCGTTATCTTGCATAAGCACTGCAGATCTTCATAAAATGTATCCTACA
CCACCATCATTGGAACAACATATTATGGGATTTTCCCCAATGAATATGAATAATAAAGAATATGGTAG
TATGGATACAACACCTGGAGGAACTGTTCTAGAAGGAAATAGTTCTAGTATAGGAGCGCAGTTCAAA
ATTGAGGTTGATGAGGGATTCTGTAGCCCCAAACCTTCTGAAATTAAAGATTTTTCTTATGTCTATAAG
CCTGAAAATTGTCAAATTCTAGTGGGATGTTCCATGTTTGCACCTCTAAAAACTCTACCAAGCCAATA
TCTGCCCCCTATCAAATTGCCAGAAGAGTGTATTTACCGTCAGAGTTGGACTGTTGGAAAATTGGAAT
TGCTTTCTTCAGGGCCTTCAATGCCATTCATCAAAGAGGGTGATGGAAGTAATATGGATCAAGAATAT
GGCACTGCTTATACACCTCAAACTCATACTTCTTTTGGGATGCCTCCTAGCAGTGCACCTCCTAGTAAC
AGCGGAGCAGGAATTCTTCCTTCTCCATCCACCCCTCGGTTTCCAACTCCAAGGACTCCAAGGACTCC
TCGGACTCCTCGTGGAGCTGGTGGACCTGCTAGTGCTCAAGGTTCAGTCAAATATGAAAATTCAGACT
TGTATTCACCAGCTTCTACCCCATCTACATGCAGACCCCTTAATTCTGTTGAACCTGCAACTGTCCCTT
CCATCCCTGAAGCACACAGTCTTTATGTAAACCTCATCCTTTCAGAATCAGTTATGAATTTGTTTAAAG
ACTGTAACTTTGATAGTTGTTGCATCTGTGTTTGCAACATGAACATCAAGGGTGCCGATGTTGGAGTTT
ACATTCCAGATCCAACGCAGGAAGCACAATATAGGTGTACCTGTGGCTTCAGTGCTGTCATGAACAGA
AAATTTGGAAACAATTCAGGATTATTTCTTGAAGATGAACTAGATATCATAGGACGCAATACAGACTG
TGGCAAAGAAGCAGAAAAACGTTTTGAAGCTCTCAGGGCTACCTCTGCTGAACATGTTAATGGAGGA
CTAAAGGAATCTGAAAAATTATCTGATGATTTGATATTATTGCTACAAGATCAGTGCACTAATTTATTT
TCACCCTTTGGAGCAGCAGACCAAGATCCTTTTCCTAAAAGTGGTGTAATTAGCAATTGGGTACGTGT
TGAAGAGCGTGACTGTTGCAATGACTGCTACCTTGCATTAGAACATGGGCGTCAGTTCATGGATAACA
TGTCAGGAGGAAAAGTTGATGAAGCACTTGTGAAAAGTTCATGCTTACACCCCTGGTCCAAAAGAAA
CGATGTGAGTATGCAGTGCTCACAGGATATACTTCGAATGCTCCTCTCTCTTCAGCCAGTTCTTCAGGA
TGCCATTCAGAAAAAAAGAACAGTAAGACCTTGGGGTGTTCAGGGTCCTCTCACTTGGCAACAATTTC
ATAAAATGGCTGGCCGAGGCTCTTATGGAACTGATGAATCCCCAGAACCACTGCCAATCCCCACATTT
TTGTTGGGTTATGATTATGATTATCTGGTGCTTTCTCCATTTGCTCTTCCTTATTGGGAGAGACTTATGC
TGGAACCCTATGGATCTCAAAGAGATATAGCCTATGTTGTACTGTGTCCAGAAAATGAAGCCTTGTTA
AATGGAGCAAAAAGCTTTTTTAGAGATCTTACTGCAATATATGAGTCCTGTCGATTAGGTCAACATAG
ACCTGTTTCTCGACTGTTAACAGATGGGATCATGAGAGTTGGATCTACTGCATCAAAGAAACTATCAG
AAAAGTTGGTAGCAGAATGGTTTTCTCAGGCAGCTGACGGTAACAATGAAGCATTTTCTAAACTCAAG
CTTTATGCACAAGTCTGCAGATATGACCTAGGTCCTTATCTTGCTTCCCTGCCATTGGACAGCTCTCTA
CTTTCCCAGCCAAATTTAGTTGCCCCTACAAGTCAGTCTTTGATTACTCCACCTCAGATGACAAATACT
GGAAATGCTAATACTCCATCTGCCACCTTAGCATCTGCAGCGAGCAGCACTATGACAGTGACTTCAGG
TGTTGCCATATCTACTTCAGTTGCCACAGCTAATTCAACTTTGACCACAGCTTCAACTTCATCTTCATC
ATCCTCCAACTTGAATAGTGGAGTATCATCAAATAAACTACCTTCGTTTCCACCCTTTGGCAGTATGAA
CAGTAATGCTGCAGGATCCATGTCTACACAAGCAAATACAGTTCAGAGTGGTCAGCTAGGAGGGCAA
CAGACATCAGCTCTACAGACAGCTGGGATTTCTGGAGAATCATCTTCACTTCCCACTCAGCCGCATCC
TGATGTGTCTGAAAGCACGATGGATCGGGATAAAGTGGGAATCCCCACAGATGGTGATTCACATGCA
GTCACGTATCCACCTGCAATTGTTGTTTATATAATTGATCCTTTTACATACGAAAATACAGACGAGAG
CACTAACTCTTCTAGTGTGTGGACATTGGGGCTACTTCGATGCTTTCTAGAAATGGTCCAGACTCTTCC
TCCTCATATCAAGAGTACTGTTTCTGTACAGATTATTCCTTGTCAGTACCTGTTGCAACCTGTGAAGCA
TGAAGATAGAGAAATCTATCCCCAGCATTTAAAATCCCTGGCTTTTTCGGCCTTTACCCAGTGTCGGA
GGCCACTTCCAACATCAACCAATGTGAAAACATTGACTGGCTTTGGTCCAGGTTTAGCCATGGAAACT
GCCCTTAGAAGTCCTGATAGACCAGAGTGTATTCGACTTTATGCACCTCCTTTTATTCTGGCTCCAGTG
AAGGACAAACAGACAGAGCTAGGAGAAACATTTGGAGAAGCTGGACAGAAATATAATGTTCTTTTTG
TGGGATACTGTTTATCACATGATCAAAGGTGGATTCTTGCATCTTGCACAGATCTATATGGAGAACTTT
TAGAAACTTGTATCATTAACATCGATGTTCCAAATAGGGCTCGTCGGAAAAAAAGTTCTGCTAGAAAA
TTTGGTCTACAGAAACTTTGGGAGTGGTGCTTAGGACTTGTACAAATGAGTTCATTGCCATGGAGAGT
TGTAATTGGTCGTCTAGGAAGGATTGGTCATGGAGAATTGAAAGATTGGAGCTGTTTGCTGAGTCGTC
GAAACTTGCAGTCTCTAAGTAAAAGGCTCAAAGACATGTGTAGAATGTGTGGTATATCTGCTGCAGAC
TCCCCTAGCATTCTCAGTGCTTGCTTGGTGGCAATGGAGCCGCAAGGCTCTTTTGTTATTATGCCAGAT
TCTGTGTCAACTGGTTCTGTATTTGGAAGAAGCACGACTCTAAATATGCAGACATCTCAGCTAAATAC
CCCACAGGATACATCATGTACTCATATACTTGTGTTTCCTACTTCTGCTTCTGTGCAAGTAGCTTCAGC
TACTTATACCACTGAAAATTTGGATTTAGCTTTCAATCCCAACAATGATGGAGCAGATGGAATGGGTA
TCTTTGATTTGTTAGACACAGGAGATGATCTTGACCCTGATATCATTAATATCCTTCCTGCTTCTCCAA
CTGGTTCTCCTGTACATTCTCCAGGATCTCATTACCCCCATGGAGGTGATGCGGGCAAGGGTCAGAGT
ACTGATCGGCTACTATCAACAGAACCTCATGAGGAAGTACCTAATATTCTTCAGCAACCATTGGCCCT
TGGTTACTTTGTATCAACTGCCAAAGCAGGTCCATTACCTGACTGGTTCTGGTCAGCATGTCCTCAAGC
ACAATATCAGTGTCCCCTTTTTCTTAAGGCCTCTTTGCACCTCCACGTGCCTTCAGTGCAATCTGACGA
GCTGCTTCACAGTAAACACTCCCACCCACTTGACTCAAATCAGACTTCAGATGTCCTCAGGTTTGTTTT
GGAACAGTACAATGCACTCTCCTGGCTAACCTGTGACCCTGCAACCCAGGACAGACGCTCATGTCTCC
CAATTCATTTTGTGGTGCTGAATCAGTTATATAACTTTATTATGAATATGCTGTGATCTTCATTTGATG
GAACTGTGCAAGAAAAGAACAAGGAAAAATGGATGTTTCGCTGCAGGATTAAGTTACAATTATCTTC
TCAGTGAAGGTCATTTGTGATGGGGTCTAATTCTTATTACTTCAACAAATATTGTTTTGACTTGGGGGG
AGGGGCTATAACCCTGCTATTTTTCATTGACTCTATTGAACTCTTTAGGATGATGACTGATCATACAAA
ACGTATTATAACATTTTCGTAGCAAAATTAACCTTTTTTTTTTCCAGTCACAGTATTTGTGAAAAGTAA
TGAGCCATAGTACCCAGTCATGTTAAATGAATATTAAAAGCATGGAGAGGAAACATGAGGAACAATG
AATTTCAACATATGGCTTCAGAACATGAAGATGTTCTTGTATGGATTATAGTATCTAGTATTCAAAAA
TGCCTGCATCTCTTCTCTTATTTATTGTAAGTTTTTAAATGTATAAATTGTCTTATATTTCTTAACCTCTT
TTATAAAAATTTTCCTAGAAGGTTTATACTGCCTTCTTGCTTTAAAGCAATTGGTCTAAAATATATGTA
ATCGTCTTAATTAAAAAGTTGCAGTAGGGTTGCTTTTAGAGTATTATTTTTTTGTAAGGGGGTGGGTGG
GACAGTAAATTTGTATTGTCTCGATGTACAGTTTAACGGGGATAGAGGGGGAATAATGTCCATACCAT
TGTGTGTGGAGGATTTACAGCTAAGCTGTAGTTGCAGAGTACATGTACAGTAATGAAGTTCACTGTGT
TTATAAATTGAAAAGGTACCAGGTCTTACAGCATTTTATATATCACATCTTTACAGAATAACATGATG
GCAATATACAAGTGGTATTGTTAGGTGGTTTAACTTAGAATAAAATGAGAATTCTTCAGTTATATTTTG
TACTATGGTTTAGGGCTATGACTAATATTTCAGGCCATTTCCGGTGAAAGAAACTTAGTTTTACAAGA
AAAACCATTTGCTACTGAATGCTTAAACTAATTTTAGTGTTTAATGTTACATGCTTAAATTTTTTTCAG
TTTTAACAGTGGCATATTTAGGCATGGAAATATTATTATGAAATTTATTTTCAGGATCTGCTATAAGGT
TGAAATTTAGCCCAGCTCTAGGCATTTTACAAATTATTTTTCAAGCAGTCATTCTTGATTGTTTGACTTT
TTTTTTTAAATTAAAGATTGGGAATGTATGTGAGAGTATGCATATGTATGGGTGTGTGTGTGTGCGCG
CAATCAAACTGTGGTGTAAATAGATTCTCAGTGAATTCTGGTATTCAGACTCTATTCCACTAGTGAAA
GAACCATTTTTTAAACTTCCCTTGCCTTTTTTATTTATTTAATTTTCTTGGTTTGGAGATGTCAGTCCCA
AACACCAGAGTCTGTACTTTTCTATAACACAGCTCAGATTAAGGTAGGGCATATGCCAAGGAGGTTCT
CACCTCCCTAAAGAAGGGACTTGAATTTTAGGGACTTTAATTCACCCCTCCTTCAATACAACTTTCCCC
CTTCTTGTTTGCACATGCCAAGATAACTGCTTTTATGCAGGCTGTACCCCCTTGAAAAATCCTTTCTAC
AGTGCTGCTCACAAAAGAGCCCAAGTTCGCCTCCTACCTGCATTGCTGACTTGAATTCACAGTCGCCG
AGTCTACCTAGCTTTCTTGGAAGCAGTCTAGCAAAATTTCTATTTGTACGTTCACTAATTATCTACAAG
GACAAAATCAGTTGTATTTACAAAACTCTACTTCAGTGTTTGTTTTAGTTTTTTTTTTTACTGAAACTTG
TTTTTGTGAATACTCTGTGCTTAGAATTAAATATCACTTTCTTATGAACAACATAACTTCTTCAGATTG
TGTATATGAAAACATTAGCAAGTCTTGTTTTTTCTATGAAGCAAACACAATTGGTGACAAAGGTTGTC
AATCATTTCTTCAAAATTATAATGCAGTTCTAATGGTCAGCATATTTTGATATTAAATTTAAAGATCAC
CTCTCTGCATTTGTTTTTAAATTATGCTAATACACCACACATTATGTTGGTATGTTTTGTTCTGTACTTT
CTTTAAAAAAAAAAAAAAAACTTGTCTGAGATTTGAAGGAAAATGTGCTTATTTGGAATTTCCATAAA
AAGAGTATCCTTTTTATACACTTAATAGTGACTTTACAAAATAAAAGTTATATTCTCAGTTGTTTAAAA
TCACTAACCTATGATAACCACACCTCAATTTGAAAGTAGATTTAAAATTATTCCCTGACAGGTTATTTA
ATATGGAGCCATAAGGAGGGAACCCAGTACACAATTATTTTTTATTTGGGAATCAGGGAATAGTTCCC
AAATATACAGGATTTATTGATAAGATTTTTTTTCTTCCCTTCATATATCCATTCAAACTCAATGGAAAG
TTATTAAATAACCATTAGAAAAGCTCAGTAGACTTATTTGAGAAATTAAGCCTTGTGCAGGATGATGG
ATTTGACTTACTAATGTACTGTCACAGACAAATATGGGTAGTTTTGTTTAAATAGGTAAGCAAAATAT
TATACTTTATAGCAGTGGATTACCAACACCTTGACTTCTTTGTTACAGTGCTAACATCTTTTTTTTTGTG
CAGGTATCCATGATTATTAAGCAGGGTGGAAGTTCAGTATTTTGTCATTTAAAAAGATTAGTTATATA
ATGTCTGCTTCCAGCCAGTGAGAAACATCTAGCCATACCTTTCTTATGCAAGCCATTGAGTTATCAGG
ACTGTGAATTAACACTGTATGAATAAATTTCTGTACACCTTATTGTTTGGCCAGAAGGCCACCAAGTG
TACTTATATGTAATCCTTAAATTTTAAAGTAGCTGTAATTTTTAAATATTTCTAAACTTTTCTTAAACCA
CTAAAATTAAGCTCTTACTACTTAGTCAACTATCCTCAGCTGTATTCGTACTCAATTGTCAGTATGGCA
CAGATTACTGTATTAAAATATTCTCCTTTCGTCTTCATATTTACCTTCTGAGGTAATTTTTTAACTTAAT
GTGTTACTACAAAGATTTGCAGATCTTTAATCAAGCACTATGTTAATACTGTAATATCAGAATACTAT
GTTGCATTATTTAAAATGTTCAAATTGAATAGATTAAAAAGTTTTTAAATGCTATTGCATCATATAATT
TGCTATTCATCCACTATGGCATTGCATATCAATCAGTTAATACACTTAATGTTGCATGAGTGATATTTT
GGTCTGGGTTTCCTCTTAAGATTTTAGTTTGTCTGAATTAAGGAAAAATGTTTTTAATATACATTCTTA
TTTTGTCCCACCCCTCCAGAAATAAGCTGGAAATCTTAACTTTTTGGGGGGTCTTTTTTGGTGTTTTAA
TGGGCCCAGAACTGTGGTTTAAATTTTTATGTATGTATTTTCTTTTTTGTGGAGTATAAATTTAAAAAC
TGGATTTGGGACCTAAAATACTCCTCAGGTTGATGTATTCATGAAGTTTTAAAACATCTTTAGTTTTCA
AAGTAAACTGGATATGTGGACCTTAAAGTTATTGAGTTTAAGCTACAAATTGTAACGTCATTACTGGA
CATGTCAGCATCAACCCTCTCAAAATAGCTTGGTCACTTTATGAAGGGGCGTTTTAAAGTTGTTGTTTA
GCAGTGACATTTAATATGGTCCAATTGCTTTTCTTTTTAACGTGACAAAAAGAGAATAAGGAACAAAC
ACTATTGCTGCCGAATGCCATAACACTGAGTTGTACAAATTGTGATTGAGGAAATGAAAAGGTTTATA
CTTTTTAAAAAAAAAAAAACAAAAACAAAAAACAAAACTTCAAATGGAATAAATTATTCATGAAGCC
TTCA

[0568] In some embodiments, oligonucleotides may have a region of complementarity to a mouse MED13 sequence, for example, as provided below by Gene ID:327987; NCBI Ref. No: NM_001080931.2:

(SEQ ID NO: 889)
CTCTCTGGTCGGAGGCGGCGGTAATGGCGGATGGTGGGTTGTGGCGCCGGCGGCGGCTGCTGTGAGG
GACGATGAGTTCCTCCTTCGTGTCGAACGGGGCCAGCCTGGAAGATTGTCACTGTAACCTCTTCTGCC
TGGCCGACTTGACAGGAATTAAGTGGAAAAGATATGTATGGCAAGGCCCAACTTCCGCCCCTATTCTG
TTTCCGGTGACAGAAGAAGACCCCATTTTGAGCAGTTTTAGTCGATGCCTTAAGGCAGATGTACTTGG
TGTTTGGCGGCGAGATCAAAGACCTGGAAGAAGAGAATTGTGGATATTTTGGTGGGGTAAAGATCCC
AATTTTGCTGACCTTATTCACCATGACTTATCAGAAGAGGAAGATGGAGTATGGGAGAATGGCCTTTC
CTATGAATGCCGTACTTTGCTTTTCAAAGCAGTTCACAATCTGTTGGAGCGATGTTTGATGAACCGAA
ACTTTGTACGAATTGGCAAGTGGTTTGTGAAGCCATATGAGAAAGATGAAAAACCTATAAATAAAAG
TGAACACTTGTCCTGCTCTTTCACCTTTTTCTTGCATGGAGACAGCAATGTTTGTACCAGTGTGGAAAT
TAACCAACATCAACCTGTATACCTTCTCAGTGAAGAGCATGTCACCCTTGCTCAACAGTCTAATAGCC
CATTTCAAGTTATCTTAAGTCCATTTGGACTAAATGGCACTCTCACGGGACAGGCTTTCAAGATGTCTG
ATTCAGCTACGAAAAAATTAATTGGTGAATGGAAACAGTTCTATCCTATTTCATGTGGTTTGAAGGAG
ATGTCTGAGGAGAAACAGGACGATATGGATTGGGAAGACGATTCTTTGGCTGCGGTGGAAGTTCTTGT
TGCGGGTGTCCGAATGATCTACCCAGCATGCTTTGTGCTAGTCCCTCAGTCAGACATTCCTGCTCCTAG
CTCTGTGGGAGCTTCTCACTGTTCAGCTTCTTGCTTGGGTATCCATCAAGTGCCTGCTTCCACAAGAGA
TCCTGCTATGTCTTCAGTTACTCTCACTCCACCTACATCTCCTGAGGAAGTCCAAACAGTTGATCCTCA
GTCCGCACAGAAGTGGGTCAAATTTTCTTCAGTATCCGATGGCTTCAGCACTGACAGTACTAGCCATC
ATGGTGGGAAAATACCCAGAAAATTAGCAAATCATGTGGTGGATAGAGTCTGGCAAGAATGTAATAT
GAACAGATTACAGAACAAGAGGAAGTATTCTGCTACATCCAGCGGCCTGTGTGAGGAAGAGACTGCC
GATAAAATAGGATGCTGGGACTTTGTTGAAGCCACACAAAGAACAAGCTGCAGTTGTTTGAGGCATA
AAAGTCTCAAGACAAGAAATACTGGGCAACAAGGACAGGCACCATCTTTAGGGCAGCAACAGCAAGT
ACTTCCTAAGCACAAGACCAATGAGAAGCAAGACAAGAGTGAGAAGCCACAGAAGCGCCCCTTGACT
CCCTTTCACCATCGTGTATCAGTTAGTGATGAGATTGGCATGGACACAGATTCAGCCAGCCAAAGACT
TGTGATCTCTGCTGCAGATAGTCAAGTGAGGTTTTCAAACATCCGAACTAATGATGTAGCAAAGACTC
CTCAGATGCATGGCACTGAACTGGCAAATTCACCTCAGCCTCCCCCACTTAGTCCTCATCCTTGTGATG
TGGTTGATGAAGGAGTGACTAAAACACCTTCAACTCCGCAGAGTCAACATTTTTATCAAATGCCAACA
CCGGATCCCTTGGTTCCTACCAAACCAATGGAAGATAGGATAGACAGTTTGTCCCAGTCTTTCCCACC
TCCATTTCAGGAAGCTGTAGAACCTACCGTGTATGTTGGTACAGCAGTAAGCTTGGAAGAAGATGAA
GCTAATGTAGCCTGGAAGTATTACAAAGTCCCAAAGAAAAAAGATGTAGAATTTTTACCACCTCAACT
TCCAAATGATAAATTCAAGGATGATCCAGTTGGACCTTTTGGACAGGAAAGTGTAACATCAGTTACAG
AGTTAATGGTGCAGTGTAAGAAGCCTTTAAAAGTTTCTGATGAAATAGTCCAGCAATATCAAATTAAA
AATCAGTATCTTTCAGCAATAGCATCTGATACAGAACAAGAACCTAAAATTGATCCATATGCATTTGT
TGAAGGAGATGAGGAATTCATTTTTACTGATAAAAAAGATAGACAAAATAGCGAGAGAGAAGCTGGG
AAGAAACACAAGGTGGAAGATGGGACATCTGCTGTCACAGTGTTATCACACGAAGAAGATGCTATGT
CATTATTTAGTCCCTCTAAACAAGATGCTCCACGCCCTACAAATCATGCCCGTCCTCCATCAACCAGTT
TGATTTATGACTCAGATTTGGCTGTGTCTTACACTGACCTTGATAACCTCTTCAATTCTGATGAAGATG
AATTAACACCTGGATCTAAAAAGTCAGCAAGTGGATCAGATGATAAAGCCAGCTCCAAAGAATCAAA
GACAGGAAATCTGGATCCGTTGTCCTGCATAAGCACTGCAGACCTCCACAAAATGTACCCCACGCCAC
CCTCACTGGAACAGCACATTATGGGCTTCTCTCCAATGAATATGAATAACAAAGAATACGGTAGTGTG
GACACAGCACCCGGAGGGACTGTCCTGGAAGGAAATAGCTCTAGTGTAGGAACGCAGTTCAGAATCG
AGGTCGAGGAAGGATTCTGTAGCCCTAAACCGTCTGAAATTAAAGATTTTTCTTATGTCTATAAGCCC
GAAAATTGTCAAGTTCTAGTAGGATGTTCCATGTTTGCACCTTTAAAAACTCTACCAAGCCATTGTCTG
CCTCCTATCAAATTGCCAGAAGAGTGTGTTTACCGGCAGAGCTGGACTGTTGGAAAATTGGACTTGCT
TCCTTCAGGCCCTTCAATGCCATTCATCAAGGAGGGTGATGGCAGTAATTTGGATCAGGACTATGGCC
CCGCCTACACACCGCAAACCCATGCTTCTTTTGGGATGCCTCCGAGCAGCGCACCTCCTAGTAATGGT
GGTGCAGGAATTCTTCCTTCCCCATCCACCCCTAGGTTTCCAACTCCAAGGACTCCAAGGACTCCAAG
GACCCCTCGTGGGGCTGGTGGGCCTGCTAGTGCTCAAGGTTCAGTCAAGTATGAGAATTCAGACTTGT
ATTCACCAGCTTCCACCCCATCTACATGCCGACCCCTCAATTCTGTTGAACCTGCAACTGTTCCTTCCA
TCCCTGAAGCGCACAGTCTTTATGTAAACCTCATCCTTTCAGAATCAGTAATGAATTTGTTTAAAGACT
GTAATTTTGATAGTTGCTGTATTTGTGTCTGCAATATGAATATCAAGGGTGCCGATGTTGGAGTTTACA
TTCCAGACCCAACCCAAGAAGCACAGTATCGGTGCACCTGTGGCTTCAGTGCTGTCATGAACCGAAAA
TTTGGAAATAATTCAGGATTATTTCTTGAAGATGAACTTGACATCATAGGACGTAACACAGACTGTGG
GAAAGAAGCAGAAAAACGTTTTGAAGCTCTCAGGGCTTCCTCTGTGGAGAATGTTAATGGAGGCCTG
AAGGAATCTGAAAAGGTGCCTGATGAATTAATATTACTGCTACAAGATCAATGCACTAATTTATTTTC
ACCCTTTGGAGCAGCAGACCAAGATCCTTTTCCCAAAGTGGGTATAAGTAGCAATTGGGTGCGTGTTG
AGGAGCGGGACTGTTGTAGTGACTGCTGCCTCGCCTTAGAACATGGGCGTCAGTTCATGGATAATATG
TCAGGAGGGAAAGTTGATGAAGCACTTGTCAGAAGCTCATGCTTACATCCGTGGGCCAAGCAAAATG
ATGCGAGCGTGCAGTGTTCACAGGATATACTTCGGATGCTCCTTTCTCTTCAGCCAGTTCTTCAAGATG
CTATTCAGAAAAAAAGAACAGTGAGGCCTTGGGGTGTTCAAGGTCCTCTCACATGGCAACAATTTCAT
AAAATGGCTGGCCGAGGCTCTTATGGAACTGATGAATCTCCGGAACCACTGCCGATTCCCACGTTTTT
GTTGGGTTATGATTACGATTTTCTGGTGCTTTCTCCATTTGCTCTCCCTTACTGGGAGAAACTTATGCTG
GAACCCTATGGATCTCAAAGAGATATAGCCTATGTTGTACTCTGTCCAGAGAATGAAGCTTTGTTAAA
TGGAGCCAGAAGCTTTTTTAGAGATCTCACTGCAATATATGAGTCCTGTCGATTAGGCCAACACAGAC
CTATTTCTCGATTGTTGACGGATGGGATCATGAAAGTGGGAGCTACTGCATCAAAGAAACTTTCAGAA
AAGTTTGTAACAGAATGGTTTTCTCAGGCAGCTGATGGTAACAATGAAGCATTTTCCAAATTGAAGCT
GTATGCACAAGTCTGCAGATATGATTTAGGTCCATATCTTGCTTCTCAGCCGTTGGACAGCTCTCTGCT
CTCCCAGCCAAATTTAGTTGCCCCTCCAAATCAGTCTTTGGTTACTGCACCTCAGATGACAAATACTGG
AAACGCTAATGCTCCATCTGCCACCTTAGCATCTGCGGCAAGTAGCACTATGACAATGACTTCAGGTG
TTCCCATATCTACTTCAGTTGCCACAGCTAATTCAACTTTGACCACAACTTCATCTTCATCATCTTCCA
GTCTGAGTAGTGGAGTATCATCAAATAAACTGCCTTCGTTTCCACCCTTTGGCAGTATGAACACTAGT
GGTACAGGATCCATGTCTGCACAAGCAAGTACGGTTCAGAGTGGCCAGCTAGGAGGACAGCAGTCGT
CATCTCTGCAGGCAGCAGGAATATCAGGGGAGTCAGCTTCTCTTCCCACTCAGCCACATCCTGATGTG
TCTGAAAGCACAATGGATCGTGATAAAGTGGGGATTCCCACAGATGGTGATTCACATGCAATTACCTA
CCCTCCTGCAATTGTTGTTTATATAATCGATCCTTTTACATATGAAAATAAAGACGAGAGCACTAACTC
TTCTAATGTATGGACTTTGGGGCTCCTTCGATGCTTCTTGGAAATGGTCCAAACTCTTCCTCCTCATAT
CAAGAGCACTGTTTCTGTGCAGATTGTTCCTTGTCAGTACCTGTTACAACCTGTGAAACACGACGACA
GACAGATCTACTCCCAGCATTTAAAATCTTTGGCTTTTTCGGTGTTTACCCAGTGTCGGAGACCACTTC
CAACATCAACCAATGTAAAAACACTGACTGGGTTTGGTCCAGGCTTAGCTATGGAAACTGCTCTTAAA
AGTCCTGATAGACCAGAGTGTATTCGACTTTATACACCACCTTTTATTCTGGCTCCGGTGAAGGACAA
ACAAACAGAGCTAGGAGAGACCTTTGGAGAAGCTGGACAGAAATACAATGTTCTTTTTGTGGGCTAC
TGTTTATCACATGATCAAAGGTGGATTCTTGCATCTTGCACAGATCTATATGGAGAACTCCTAGAAAC
ATGTATCATTAACATCGATGTTCCAAATAGGGCCCGTCGGAAAAAGGGTTCTGCTAGAAGATTTGGTC
TACAGAAACTGTGGGAGTGGTGCTTGGGACTTGTTCAGATGAGCTCTTTACCATGGAGAGTTGTGATT
GGTCGCCTGGGAAGGATTGGACATGGAGAGTTGAAAGATTGGAGTTGTTTGCTGAGTCGTCGAAACTT
GCAATCTCTAAGCAAAAGGCTCAAAGACATGTGTAGGATGTGTGGCATATCTGCTGCAGACTCTCCAA
GTATCCTTAGTGCTTGTTTGGTTGCAATGGAACCCCAAGGTTCTTTTGTTATCATGCCAGATTCTGTGT
CAACTGGTTCTGTTTTTGGAAGAAGTACCACTCTAAATATGCAGACGCCTCAGCTAAATACCCCACAA
GATACATCCTGTACTCATATACTTGTGTTCCCTACTTCTGCTTCTGTGCAAGTAGCTTCAGCTACTTAC
ACCACTGAAAATTTGGATTTAGCTTTCAATCCCAACAATGATGGAGCAGACGGAATGGGTATCTTTGA
TTTATTAGACACAGGAGATGATCTTGATCCTGATATCATTAATATCCTTCCTGCATCTCCAACTGCATC
TCCTGTACATTCTCCAGGCTCTCATTACCCCCATGGAGGTGATGCTGGCAAGGGTCAGGGTACTGATC
GGCTACTTTCAACAGAATCGCATGATGAAGTAACTAATATTCTTCAACAACCATTGGCCCTTGGATAC
TTTGTATCAACTGCCAAAGCGGGTCCATTACCTGACTGGTTCTGGTCAGCATGCCCTCAAGCACAATA
TCAATGCCCCCTTTTTCTTAAGGCCTCTTTGCACCTCCACGTGCCTTCAGTGCAATCTGACGAGCTGCT
TCACAGCAAACACTCCCACCCACTGGACTCAAATCAGACTTCAGATGTCCTCAGGTTTGTTTTGGAAC
AGTACAATGCACTCTCATGGCTAACCTGTGACCCTGCAGTCCAGGACAGACGCTCATGTCTCCCAGTT
CATTTTGTGGTGCTGAATCAGTTATATAACTTCATCATGAATATGCTGTGATCCTCGTTTGATGGAATT
ACGCAAGGAAAGAACGGGAAGAAAGGATATTTTGCTGCAAGATTAAGTTACAGTTCTCAGTGGAAGT
CATTTGTGATGGGGTCTAATTCTTATTACTTCAACAAATATTGTTTTGACTTGGGGGGCGGGGCTATAA
CCCTATTTTTCATTGACTTTACTGAGCTCTTTAGGATGATGACTGATTATTCAAAACGTATTATAACAC
TTTCGTAGCAAAAATTAACCTTTTTTTTCCAGTCACAGTATTTGTGAAAAGTAATGAGCCATAGTACCC
ATTAATGTTAAAGAATATTAAAGCATGGAGAGGAACATGAGGAACAATGAATTCCAACATATGGCTT
TAGAACATCAGGATGTTCTTGTATTGGATATAGTATCTAGTATTCAAAAATGCCTGCATCTCTTATTTA
TTGTAAGTTTTTAAATGTATAAATTGTCTTATATTTCTTAACCTCTTTTATAAAAATTTTCCTAGAAGGT
TTATACTGCCTTCTTGCTTTAAAGCAATTGGTCTAAAATATATGTAATCGTCTTAATTAAAACGTTGCA
GTAGGGTTGCTTTTAGAGTATTATTTTTTTGTAAGGGGGTGGGGTGGACAGTAAATTTGTATTGTCTCA
ATGTACAGTTTAACAGGGATAGAGGGGAAATAATGTCCATGCCATTGTGTGTGGAAGATTTACAGCTA
AGCTGTAGTTGCAGAGTACATGTACAGTAATGAAGTTCACTGTGTTTATAAACTGAAAAGGTACCGGG
TCTTACAGCATTTTATATATCACACCTTTACAGAATAACATGATGGCAATATACATACGTGATATTGTT
AGGTGGAATAACTTAGAATAAAATGAGAATTCTTGAGTTATATTTTGTACTATGGTTTAGGGCTATGA
CTAATATTTCAGGCCATTTCCAGTGAAAGAAACTTAGTTTTACAAGAAAACATTTGCTACTGAATGCT
TACACTAATCTTGGTGTTTAATGTTACATGCTTAAATTCTTTTCAGTTTTCACAGTGGCACATTTAGGC
ATGGGGATAGTACTAATTATGAAATTTCCTGCAGGATCTGTTCTAAGGTTGAAATTTAGCCCAGCTCT
AGGCATTTTACAAATTATTTTAAGAACAGTCACTCTTGATTGTTTTACTTTTTATTTTTAAATTAAAGAT
TGGGAATGCGTGTGAGAGTATGCATAAGCATGGCAGGAAGAGAGGGGGGAGAGAGAAAGAGAGAGA
GAGTGAGAAAGAAAGAGAGAGTGAGAGTGTGTGTGTATATGTGTGTGTGTGTGCAATCAAACTGTGG
TGTAAATAGATCCTCAGTGAATTCTGGTATTCAGACTCTGTTCCACTAGTGAATGAACCATTTTCTAAA
CGTTTCCCTTTGACTTTTTTATTTATTGAATTTTCTTGGTTTGGAGATGGCAGTCCCAAACACCAGAGTC
TGTACTTTTCTATGACACAGCTCAAATTAAAGTAGGGCACATGCCAAGGAGGTTCTCACCTCCCTAAA
GAAGGGACTTGAATTTTAGGGACTTTAATTCACCCTTTCCTTCAATCCAGCTTTCCCCCTTCTTGTTTGC
ACATGCCAAGATAACTGCTTTTATGCAGGCTTTACCCCTGAAAAACTCCTTTCTACAGTGCTGCTCACG
AGAGCCCAGCCAGTCTCATGCCTGCATTGCTGACTTGAACTCACAGTCGCCAAGTCTACCTATCTTTCT
TGGAAGCAGTCTTTCAAAATTCCTACTTGTATATTCATCCATTGTTGACAAGGACAAAATCAGTTGTAT
TTACAAAACTCTTAACTCGGTATTTTTTTTTTAAACTGAATCCTGTTTTGTAAATAATATACATTTAATG
TTGCTTAGCATAAAAAATACTTTCTTACAGTAATCTTCTTTAAATTGGGTATATGAAAACATTACCAAC
TCTTGTTTTTCTATAAAGAAATACAGTTAATAACAAGGTTTCAAATTATTCCTTTAACATTAATAGAAC
AATCCAAATGTTGAGCATATTTTGATATTAAACTAAAGATCACGTCTCTGTTTTTAAATTATGCTAACA
CCACCACAGATTATGTTGACGTATTTTCTTCTGTATTTTCTTGGTGGGACTTGAGATTTGAGGAAAAAA
GATGCTTATTTGGAATTTCTATTAAGAACTATCCTTGTTATTTTCTTAGCTCAATAATTACTCAAGAAA
AATAAAAGATTATAATCTCAGTTTAAAATTACTAATGTGTGACAACCATACCTCAGTTTGAAATAGAT
TTAACAAGATTATTCCCTGACATTTTCTTCCATGTAGCCATAAGCAGGGACCCAGCATACAATTCTTCT
TACCTAGGAATCAGGAACTAGTCCCAAATATACAGGATTGAGTCATGGTTTGCTTTTTTTTTTTTTCCT
TTCCTTTTTTTCTCCCCTTTACACATCAGATTTTGCTCAAATAGGAGGTAACTAAATAGCCATTAGAAG
AAGAAGTGAAGCCTTTCATGCAGGATGATAGATCTAACTTATCAATGTACTGTCACAGTACATTAATC
GTTTTATTTGAGTAGGTAAACAAATTTGCACACTTTTCCCCAGTGAATTCCCAACACCTTGACTTCCTC
ATTTCAGTGCTAATAACCTGTTTTGTGTGCAGTTAATCCATTCTGAAGCAGGTGAAAGGTCAGTATTTT
AGCATTTTAAAAGATGAGTTATATAATGTCTGCTTCCAGCCAGTCTGCAACATCTAGCCATACCTTTCT
TATGCAAGCCATTCAGTTATCAGGACTGTGAATTAACACTGTATGAATACATTTCTGTACACCTTATTG
TTTGGCCAGAGGGCCACCAAGTGTACTTATATGTAATCCTTAAATTTTAAACTAGCTTGTGATTTTTAA
ATATTTCTAAACTTTTCTTAAACCACTAAAATTAAGCTCTTACTACTTAGTCAACTATCCTCAGCTGTA
TTCGTCTTCAATTGTCAGTATGGCACAGATCACTGTATTAAAATGCTCTTTCGTCTTCATATTTACCTTC
TGAGGTCATTTTTTAACTTAATGTGTTACTACAAAGATTTGCAGATCTTTAATCAAGCACTATGTTAAT
ACTGTAATATCAAAATACTATGTCGAATTATTTCAGATGTTCAGATTGAATAGGGTAAAAGAAAGTCT
TTAAATGCTATCGCATCCTAGACCCTCTTCCCACCTACTATGGCATTGCATATTAGTCTGTTGAGACAT
TCATTGTTGCTTGACTGACATTTTGGTCTGGGTTTTCTTTTAATATTTTATTTTAATTAAAATTAGGAAA
AAATGTGTTCAACAATTTTTTTTTTGTCCCATCTTCTCCAAATCAGTGGGAAAAGCTTACCTTTTGGTA
TATCTTAGTGTTTTCATGGGCCCAGAACTGTGGTTTAAATTTTTATATGTATTCTCATTCTCATATTCAC
TCATACTCACTCTTTTTCTCTCTCTCCCTCTCTCTCCCTCTCTCCCCCCCCCTTCTCTTTTGTGGAGTATA
AATTAAAAAAACTGGATTTGGGACCTACAATACTCCTCAGGTTGAGATATTCTTGAAGTTTTAAAATA
GCTTTAGTTTTTAAAGTAAACTGGATTTGTGGACCTTAAAGTTACTGAGTTTAAACTACAAATTGTAAC
ATCATTACTGAACATGTCCGCATCAACCCTCTGAGAATAACTTGGTCACTTTATGAAGGGGCGTTTTTA
AGTTGTTTAGCAGTGACATTTAATATGGTCCAATTGCTTTTCTTTTTAACATGACAAACAATTTTAAAA
GAGACTAAGGAACAAACACTATTGCGCCGAATGCCATAACACTGAGTTGTACAAATTGTGATTGAGG
AGATGAAAAAGTTTATACTTTTTAAAAAAAAAAAAAACAAAAAACAAAACTTCAAATGGAATAAATT
ATTCATGAAGCCTTC

[0569] In some embodiments, the oligonucleotide may have region of complementarity to a disease allele of MED13, for example as reported in Snijders Blok L., et. al, “De novo mutations in MED13, a component of the Mediator complex, are associated with a novel neurodevelopmental disorder” Hum. Genet. 2018, 137:375-388.

[0570] In some embodiments, an oligonucleotide comprises a region of complementarity to a MED13 sequence as set forth in SEQ ID NO: 888 or SEQ ID NO: 889. In some embodiments, the oligonucleotide comprises a region of complementarity that is at least 80%, 85%, 90%, 95%, 96%, 97%, 98%, 99%, or 100% complementary to a MED13 sequence as set forth in SEQ ID NO: 888 or SEQ ID NO: 889. In some embodiments, the oligonucleotide comprises a sequence that has at least 10, 11, 12, 13, 14, 15, 16, 17, 18, or 19 consecutive nucleotides that are perfectly complementary to a MED13 sequence as set forth in SEQ ID NO: 888 or SEQ ID NO: 889. In some embodiments, an oligonucleotide may comprise a sequence that targets (e.g., is complementary to) an RNA version (i.e., wherein the T's are replaced with U's) of a MED13 sequence as set forth in SEQ ID NO: 888 or SEQ ID NO: 889. In some embodiments, the oligonucleotide comprises a sequence that is complementary (e.g., at least 80%, 85%, 90%, 95%, 96%, 97%, 98%, 99%, or 100% complementary) to an RNA version of a MED13 sequence as set forth in SEQ ID NO: 888 or SEQ ID NO: 889. In some embodiments, the oligonucleotide comprises a sequence that has at least 10, 11, 12, 13, 14, 15, 16, 17, 18, or 19 consecutive nucleotides that are perfectly complementary to an RNA version of a MED13 sequence as set forth in SEQ ID NO: 888 or SEQ ID NO: 889.

[0571] In some embodiments, a MED13-targeting oligonucleotide comprises an antisense strand that comprises at least 10, 11, 12, 13, 14, 15, 16, 17, 18, or 19 consecutive nucleotides of a sequence comprising any one of SEQ ID NOs: 938-961. In some embodiments, a MED13-targeting oligonucleotide comprises an antisense strand that comprises any one of SEQ ID NOs: 938-961. In some embodiments, a MED13-targeting oligonucleotide comprises an antisense strand that comprises shares at least 70%, 75%, 80%, 85%, 90%, 95%, or 97% sequence identity with at least 12 or at least 15 consecutive nucleotides of any one of SEQ ID NOs: 938-961.

[0572] In some embodiments, a MED13-targeting oligonucleotide comprises an antisense strand that targets a MED13 sequence comprising any one of SEQ ID NOs: 890-937. In some embodiments, an oligonucleotide comprises an antisense strand comprising at least 10, 11, 12, 13, 14, 15, 16, 17, 18, or 19 nucleotides (e.g., consecutive nucleotides) that are complementary to a MED13 sequence comprising any one of SEQ ID NOs: 890-937. In some embodiments, a MED13-targeting oligonucleotide comprises an antisense strand comprising a sequence that is at least 70%, 75%, 80%, 85%, 90%, 95%, or 97% complementary with at least 12 or at least 15 consecutive nucleotides of any one of SEQ ID NOs: 890-937.

[0573] In some embodiments, a MED13-targeting oligonucleotide comprises an antisense strand comprises a region of complementarity to a target sequence as set forth in any one of SEQ ID NOs: 890-937. In some embodiments, the region of complementarity is at least 8, at least 9, at least 10, at least 11, at least 12, at least 13, at least 14, at least 15, at least 16, at least 17, or at least 19 nucleotides in length. In some embodiments, the region of complementarity is 8, 9, 10, 11, 12, 13, 14, 15, 16, 17, 18, or 19 nucleotides in length. In some embodiments, the region of complementarity is in the range of 8 to 20, 10 to 20 or 15 to 20 nucleotides in length. In some embodiments, the region of complementarity is fully complementary with all or a portion of its target sequence. In some embodiments, the region of complementarity includes 1, 2, 3 or more mismatches.

[0574] In some embodiments, a MED13-targeting oligonucleotide further comprises a sense strand that hybridizes to the antisense strand to form a double stranded siRNA. In some embodiments, the MED13-targeting oligonucleotide comprises an antisense strand that comprises the nucleotide sequence of any one of SEQ ID NOs: 938-961. In some embodiments, the MED13-targeting oligonucleotide further comprises a sense strand that comprises the nucleotide sequence of any one of SEQ ID NOs: 914-937.

[0575] In some embodiments, the MED13-targeing oligonucleotide is a double stranded oligonucleotide (e.g., an siRNA) comprising an antisense strand that comprises the nucleotide sequence of any one of SEQ ID NOs: 938-961 and a sense strand that hybridizes to the antisense strand and comprises the nucleotide sequence of any one of SEQ ID NOs: 914-937, wherein the antisense strand and/or (e.g., and) comprises one or more modified nucleosides (e.g., 2′-modified nucleosides). In some embodiment, the one or more modified nucleosides are selected from 2′-O-Me and 2′-F modified nucleosides.

[0576] In some embodiments, the MED13-targeing oligonucleotide is a double stranded oligonucleotide (e.g., an siRNA) comprising an antisense strand that comprises the nucleotide sequence of any one of SEQ ID NOs: 938-961 and a sense strand that hybridizes to the antisense strand and comprises the nucleotide sequence of any one of SEQ ID NOs: 914-937, wherein the each nucleoside in the antisense strand and/or (e.g., and) each nucleoside in the sense strand is a 2′-modified nucleoside selected from 2′-O-Me and 2′-F modified nucleosides.

[0577] In some embodiments, the MED13-targeing oligonucleotide is a double stranded oligonucleotide (e.g., an siRNA) comprising an antisense strand that comprises the nucleotide sequence of any one of SEQ ID NOs: 938-961 and a sense strand that hybridizes to the antisense strand and comprises the nucleotide sequence of any one of SEQ ID NOs: 914-937, wherein the each nucleoside in the antisense strand and each nucleoside in the sense strand is a 2′-modified nucleoside selected from 2′-O-Me and 2′-F modified nucleosides, and wherein the antisense strand and/or (e.g., and) the sense strand each comprises one or more phosphorothioate internucleoside linkages. In some embodiments, the sense strand does not comprise any phosphorothioate internucleoside linkages (all the internucleoside linkages in the sense strand are phosphodiester internucleoside linkages), and the antisense strand comprises 1, 2, or 3 phosphorothioate internucleoside linkages. In some embodiments, the antisense strand comprises 2 phosphorothioate internucleoside linkages, optionally wherein the two internucleoside linkages at the 3′ end of the antisense strand are phosphorothioate internucleoside linkages and the rest of the internucleoside linkages in the antisense strand are phosphodiester internucleoside linkages,

[0578] In some embodiments, the antisense strand of the MED13-targeing oligonucleotide comprises a structure of (5′ to 3′): fNfNmNfNmNfNmNfNmNfNmNfNmNfNmNfNmNfNmNfNmN*fN*mN, wherein “mN” indicates 2′-O-methyl (2′-O-Me) modified nucleosides; “fN” indicates 2′-fluoro (2′-F) modified nucleosides; “*” indicates phosphrothioate internucleoside linkage; and the absence of “*” between two nucleosides indicate phosphodiester internucleoside linkage.

[0579] In some embodiments, the sense strand of the MED13-targeing oligonucleotide comprises a structure of (5′ to 3′): mNmNfNmNfNmNfNmNfNmNfNmNfNmNfNmNfNmNfNmNfN, wherein “mN” indicates 2′-O-methyl (2′-O-Me) modified nucleosides; “fN” indicates 2′-fluoro (2′-F) modified nucleosides; and the absence of “*” between two nucleosides indicate phosphodiester internucleoside linkage.

[0580] In some embodiments, the antisense strand of the MED13-targeing oligonucleotide is selected from the modified version of SEQ ID NOs: 938-961 listed in Table 37. In some embodiments, the sense strand of the MED13-targeing oligonucleotide is selected from the modified version of SEQ ID NOs: 914-937 listed in Table 37. In some embodiments, the MED13-targeing oligonucleotide is a siRNA selected from the siRNAs listed in Table 37.

TABLE 35
MED13 Target Sequences

| Reference sequence | Corresponding first | MED13 Target | |
|---|---|---|---|
| NM_005121.3 | nucleotide of | Sequence | SEQ ID |
| (SEQ ID NO: 888) | Reference Sequence | (5′ to 3′) | NO: |
| NM_005121.3 | 351 | ACCTTATTCACCATGACTT | 890 |
| NM_005121.3 | 1018 | AAGAGATCCTGCTATGTCT | 891 |
| NM_005121.3 | 1109 | GTCAAATTTTCTTCAGTAT | 892 |
| NM_005121.3 | 2143 | ACAAGAACCTAAAATTGAT | 893 |

| | | | |
|---|---|---|---|
| NM_005121.3 | 2296 | AGAAGATGCTATGTCATTA | 894 |
| NM_005121.3 | 3154 | TGCTAGTGCTCAAGGTTCA | 895 |
| NM_005121.3 | 4006 | ACAATTTCATAAAATGGCT | 896 |
| NM_005121.3 | 5851 | GCCAGATTCTGTGTCAACT | 897 |
| NM_005121.3 | 6380 | CACGTGCCTTCAGTGCAAT | 898 |
| NM_005121.3 | 6444 | ATCAGACTTCAGATGTCCT | 899 |
| NM_005121.3 | 6722 | AACAAATATTGTTTTGACT | 900 |
| NM_005121.3 | 7056 | TAAATGTATAAATTGTCTT | 901 |
| NM_005121.3 | 7070 | GTCTTATATTTCTTAACCT | 902 |
| NM_005121.3 | 7098 | AAATTTTCCTAGAAGGTTT | 903 |
| NM_005121.3 | 7147 | CTAAAATATATGTAATCGT | 904 |
| NM_005121.3 | 1987 | CAAGGATGATCCAGTTGGA | 905 |
| NM_005121.3 | 6552 | TTGTGGTGCTGAATCAGTT | 906 |
| NM_005121.3 | 303 | GAAGAGAATTGTGGATATT | 907 |
| NM_005121.3 | 280 | GCGGCGAGATCAAAGACCT | 908 |
| NM_005121.3 | 1555 | CCAAAGACTTGTGATCTCT | 909 |
| NM_005121.3 | 4173 | GAGATATAGCCTATGTTGT | 910 |
| NM_005121.3 | 1186 | AGCAAATCATGTGGTGGAT | 911 |
| NM_005121.3 | 4027 | CCGAGGCTCTTATGGAACT | 912 |
| NM_005121.3 | 5454 | ACTGTTTATCACATGATCA | 913 |

*The target sequences contain Ts, but binding to RNA and/or DNA is contemplated.

[0581] In some embodiments, an oligonucleotide may comprise or consist of any sequence as provided in Table 36.

TABLE 36
Oligonucleotide sequences for targeting MED13

| Passenger Strand/ | | Guide Strand/ | |
|---|---|---|---|
| Sense Strand | SEQ ID | Antisense Strand | SEQ ID |
| (RNA) (5′ to 3′) | NO: | (RNA) (5′ to 3′) | NO: |
| UGACCUUAUUCACCAUGACUU | 914 | AAGUCAUGGUGAAUAAGGUCAGC | 938 |
| ACAAGAGAUCCUGCUAUGUCU | 915 | AGACAUAGCAGGAUCUCUUGUGG | 939 |
| GGGUCAAAUUUUCUUCAGUAU | 916 | AUACUGAAGAAAAUUUGACCCAC | 940 |
| GAACAAGAACCUAAAAUUGAU | 917 | AUCAAUUUUAGGUUCUUGUUCUG | 941 |
| GAAGAAGAUGCUAUGUCAUUA | 918 | UAAUGACAUAGCAUCUUCUUCAU | 942 |
| CCUGCUAGUGCUCAAGGUUCA | 919 | UGAACCUUGAGCACUAGCAGGUC | 943 |
| CAACAAUUUCAUAAAAUGGCU | 920 | AGCCAUUUUAUGAAAUUGUUGCC | 944 |
| AUGCCAGAUUCUGUGUCAACU | 921 | AGUUGACACAGAAUCUGGCAUAA | 945 |
| UCCACGUGCCUUCAGUGCAAU | 922 | AUUGCACUGAAGGCACGUGGAGG | 946 |
| AAAUCAGACUUCAGAUGUCCU | 923 | AGGACAUCUGAAGUCUGAUUUGA | 947 |
| UCAACAAAUAUUGUUUUGACU | 924 | AGUCAAAACAAUAUUUGUUGAAG | 948 |
| UUUAAAUGUAUAAAUUGUCUU | 925 | AAGACAAUUUAUACAUUUAAAAA | 949 |
| UUGUCUUAUAUUUCUUAACCU | 926 | AGGUUAAGAAAUAUAAGACAAUU | 950 |
| AAAAAUUUUCCUAGAAGGUUU | 927 | AAACCUUCUAGGAAAAUUUUUAU | 951 |
| GUCUAAAAUAUAUGUAAUCGU | 928 | ACGAUUACAUAUAUUUUAGACCA | 952 |
| UUCAAGGAUGAUCCAGUUGGA | 929 | UCCAACUGGAUCAUCCUUGAAUU | 953 |
| UUUUGUGGUGCUGAAUCAGUU | 930 | AACUGAUUCAGCACCACAAAAUG | 954 |
| AAGAAGAGAAUUGUGGAUAUU | 931 | AAUAUCCACAAUUCUCUUCUUCC | 955 |
| UGGCGGCGAGAUCAAAGACCU | 932 | AGGUCUUUGAUCUCGCCGCCAAA | 956 |
| AGCCAAAGACUUGUGAUCUCU | 933 | AGAGAUCACAAGUCUUUGGCUGG | 957 |
| AAGAGAUAUAGCCUAUGUUGU | 934 | ACAACAUAGGCUAUAUCUCUUUG | 958 |
| UUAGCAAAUCAUGUGGUGGAU | 935 | AUCCACCACAUGAUUUGCUAAUU | 959 |
| GGCCGAGGCUCUUAUGGAACU | 936 | AGUUCCAUAAGAGCCUCGGCCAG | 960 |
| AUACUGUUUAUCACAUGAUCA | 937 | UGAUCAUGUGAUAAACAGUAUCC | 961 |

[0582] In some embodiments, an oligonucleotide is a modified oligonucleotide as provided in Table 37, wherein ‘mN’ represents a 2′-O-methyl modified nucleoside (e.g., mU is 2′-O-methyl modified uridine), ‘fN’ represents a 2′-fluoro modified nucleoside (e.g., fU is 2′-fluoro modified uridine), ‘*’ represents a phosphorothioate internucleoside linkage, and lack of “*” between nucleosides indicate phosphodiester internucleoside linkage.

TABLE 37
Modified Oligonucleotides for targeting MED13

| | Modified Passenger Strand/ | | Modified Guide Strand/ | |
|---|---|---|---|---|
| | Sense Strand | SEQ | Antisense Strand | SEQ ID |
| siRNA # | (RNA) (5′ to 3′) | ID NO: | (RNA) (5′ to 3′) | NO: |
| hsMED13-1 | mUmGfAmCfCmUfUmAfU | 914 | fAfAmGfUmCfAmUfGmGfUm | 938 |
| | mUfCmAfCmCfAmUfGmAf | | GfAmAfUmAfAmGfGmUfCmA | |
| | CmUfU | | *fG*mC | |
| hsMED13-2 | mAmCfAmAfGmAfGmAfU | 915 | fAfGmAfCmAfUmAfGmCfAmG | 939 |
| | mCfCmUfGmCfUmAfUmGf | | fGmAfUmCfUmCfUmUfGmU*f | |
| | UmCfU | | G*mG | |
| hsMED13-3 | mGmGfGmUfCmAfAmAfU | 916 | fAfUmAfCmUfGmAfAmGfAm | 940 |
| | mUfUmUfCmUfUmCfAmGf | | AfAmAfUmUfUmGfAmCfCmC | |
| | UmAfU | | *fA*mC | |
| hsMED13-4 | mGmAfAmCfAmAfGmAfA | 917 | fAfUmCfAmAfUmUfUmUfAm | 941 |
| | mCfCmUfAmAfAmAfUmUf | | GfGmUfUmCfUmUfGmUfUmC | |
| | GmAfU | | *fU*mG | |
| hsMED13-5 | mGmAfAmGfAmAfGmAfU | 918 | fUfAmAfUmGfAmCfAmUfAm | 942 |
| | mGfCmUfAmUfGmUfCmAf | | GfCmAfUmCfUmUfCmUfUmC | |
| | UmUfA | | *fA*mU | |
| hsMED13-6 | mCmCfUmGfCmUfAmGfU | 919 | fUfGmAfAmCfCmUfUmGfAmG | 943 |
| | mGfCmUfCmAfAmGfGmUf | | fCmAfCmUfAmGfCmAfGmG*f | |
| | UmCfA | | U*mC | |
| hsMED13-7 | mCmAfAmCfAmAfUmUfU | 920 | fAfGmCfCmAfUmUfUmUfAmU | 944 |
| | mCfAmUfAmAfAmAfUmG | | fGmAfAmAfUmUfGmUfUmG*f | |
| | fGmCfU | | C*mC | |
| hsMED13-8 | mAmUfGmCfCmAfGmAfU | 921 | fAfGmUfUmGfAmCfAmCfAmG | 945 |
| | mUfCmUfGmUfGmUfCmAf | | fAmAfUmCfUmGfGmCfAmU*f | |
| | AmCfU | | A*mA | |
| hsMED13-9 | mUmCfCmAfCmGfUmGfC | 922 | fAfUmUfGmCfAmCfUmGfAmA | 946 |
| | mCfUmUfCmAfGmUfGmCf | | fGmGfCmAfCmGfUmGfGmA*f | |
| | AmAfU | | G*mG | |
| hsMED13-10 | mAmAfAmUfCmAfGmAfC | 923 | fAfGmGfAmCfAmUfCmUfGmA | 947 |
| | mUfUmCfAmGfAmUfGmU | | fAmGfUmCfUmGfAmUfUmU*f | |
| | fCmCfU | | G*mA | |
| hsMED13-11 | mUmCfAmAfCmAfAmAfU | 924 | fAfGmUfCmAfAmAfAmCfAmA | 948 |
| | mAfUmUfGmUfUmUfUmG | | fUmAfUmUfUmGfUmUfGmA*f | |
| | fAmCfU | | A*mG | |
| hsMED13-12 | mUmUfUmAfAmAfUmGfU | 925 | fAfAmGfAmCfAmAfUmUfUm | 949 |
| | mAfUmAfAmAfUmUfGmU | | AfUmAfCmAfUmUfUmAfAmA | |
| | fCmUfU | | *fA*mA | |
| hsMED13-13 | mUmUfGmUfCmUfUmAfU | 926 | fAfGmGfUmUfAmAfGmAfAm | 950 |
| | mAfUmUfUmCfUmUfAmA | | AfUmAfUmAfAmGfAmCfAmA | |
| | fCmCfU | | *fU*mU | |
| hsMED13-14 | mAmAfAmAfAmUfUmUfU | 927 | fAfAmAfCmCfUmUfCmUfAmG | 951 |
| | mCfCmUfAmGfAmAfGmGf | | fGmAfAmAfAmUfUmUfUmU*f | |
| | UmUfU | | A*mU | |
| hsMED13-15 | mGmUfCmUfAmAfAmAfU | 928 | fAfCmGfAmUfUmAfCmAfUmA | 952 |
| | mAfUmAfUmGfUmAfAmU | | fUmAfUmUfUmUfAmGfAmC*f | |
| | fCmGfU | | C*mA | |
| hsMED13-16 | mUmUfCmAfAmGfGmAfU | 929 | fUfCmCfAmAfCmUfGmGfAmU | 953 |
| | mGfAmUfCmCfAmGfUmUf | | fCmAfUmCfCmUfUmGfAmA*f | |
| | GmGfA | | U*mU | |
| hsMED13-17 | mUmUfUmUfGmUfGmGfU | 930 | fAfAmCfUmGfAmUfUmCfAmG | 954 |
| | mGfCmUfGmAfAmUfCmAf | | fCmAfCmCfAmCfAmAfAmA*f | |
| | GmUfU | | U*mG | |
| hsMED13-18 | mAmAfGmAfAmGfAmGfA | 931 | fAfAmUfAmUfCmCfAmCfAmA | 955 |
| | mAfUmUfGmUfGmGfAmU | | fUmUfCmUfCmUfUmCfUmU*f | |
| | fAmUfU | | C*mC | |
| hsMED13-19 | mUmGfGmCfGmGfCmGfA | 932 | fAfGmGfUmCfUmUfUmGfAm | 956 |
| | mGfAmUfCmAfAmAfGmA | | UfCmUfCmGfCmCfGmCfCmA* | |
| | fCmCfU | | fA*mA | |
| hsMED 13-20 | mAmGfCmCfAmAfAmGfA | 933 | fAfGmAfGmAfUmCfAmCfAmA | 957 |
| | mCfUmUfGmUfGmAfUmCf | | fGmUfCmUfUmUfGmGfCmU*f | |
| | UmCfU | | G*mG | |
| hsMED13-21 | mAmAfGmAfGmAfUmAfU | 934 | fAfCmAfAmCfAmUfAmGfGmC | 958 |
| | mAfGmCfCmUfAmUfGmUf | | fUmAfUmAfUmCfUmCfUmU*f | |
| | UmGfU | | U*mG | |
| hsMED 13-22 | mUmUfAmGfCmAfAmAfU | 935 | fAfUmCfCmAfCmCfAmCfAmU | 959 |
| | mCfAmUfGmUfGmGfUmG | | fGmAfUmUfUmGfCmUfAmA*f | |
| | fGmAfU | | U*mU | |
| hsMED 13-23 | mGmGfCmCfGmAfGmGfC | 936 | fAfGmUfUmCfCmAfUmAfAmG | 960 |
| | mUfCmUfUmAfUmGfGmA | | fAmGfCmCfUmCfGmGfCmC*f | |
| | fAmCfU | | A*mG | |
| hsMED 13-24 | mAmUfAmCfUmGfUmUfU | 937 | fUfGmAfUmCfAmUfGmUfGm | 961 |
| | mAfUmCfAmCfAmUfGmAf | | AfUmAfAmAfCmAfGmUfAmU | |
| | UmCfA | | *fC*mC | |

[0583] 1. PPP1R3A Oligonucleotides

[0584] Examples of oligonucleotides for targeting PPP1R3A are described in Cordero P, et al., Pathologic gene network rewiring implicates PPP1R3A as a central regulator in pressure overload heart failure. Nat Commun. 2019 Jun. 24; 10(1):2760. doi: 10.1038/s41467-019-10591-5; the contents of which are incorporated herein in their entirety.

[0585] In some embodiments, oligonucleotides may have a region of complementarity to a human PPP1R3A sequence, for example, as provided below by Gene ID: 5506; NCBI Ref. No: NM_002711.4:

(SEQ ID NO: 962)
ATCAGAGAGCCCAATGGAGCCTTCTGAAGTACCTAGTCAGATTAGCAAAGATAATTTTTTAGAAGTTC
CTAATTTATCTGACTCTCTTTGTGAAGATGAAGAAGTTACTTTCCAACCTGGTTTCTCCCCTCAACCAA
GTAGACGAGGTTCTGATTCTTCTGAAGACATATACCTGGATACCCCATCTTCAGGTACTAGAAGAGTT
TCATTTGCTGATTCCTTTGGATTCAATCTTGTGTCTGTTAAAGAATTTGATTGCTGGGAATTACCGAGT
GCTTCAACCACTTTTGACTTAGGGACGGACATTTTCCACACAGAAGAATATGTTTTAGCCCCACTGTTT
GACTTGCCTTCTTCAAAAGAAGATCTTATGCAACAACTCCAAATACAGAAAGCAATACTGGAGTCAAC
TGAGTCTCTTCTTGGGTCTACAAGTATCAAGGGTATTATTCGAGTTTTGAATGTTTCTTTTGAGAAGTT
AGTATATGTAAGAATGTCTTTAGATGACTGGCAGACACATTATGACATTTTAGCAGAATATGTTCCTA
ATTCATGTGATGGTGAAACTGACCAGTTCTCCTTTAAGATTGTATTGGTTCCTCCTTATCAAAAAGATG
GCAGTAAAGTTGAGTTTTGTATACGTTATGAAACTTCTGTTGGTACATTTTGGTCAAATAATAATGGCA
CAAATTATACATTCATTTGTCAAAAGAAAGAACAAGAGCCGGAGCCTGTAAAACCATGGAAAGAAGT
TCCTAACAGACAAATAAAAGGCTGCTTAAAGGTAAAATCAAGTAAAGAAGAATCATCAGTAACATCA
GAAGAAAATAACTTTGAGAATCCAAAGAATACAGATACCTATATCCCAACAATCATTTGTTCTCATGA
GGACAAGGAAGATTTGGAAGCCAGTAATCGAAATGTAAAAGATGTAAACAGGGAACATGATGAACA
TAATGAAAAAGAATTAGAGTTGATGATAAATCAACACTTAATAAGAACCAGAAGTACTGCTTCCAGA
GATGAAAGGAATACATTTTCAACAGATCCAGTCAATTTTCCAAATAAAGCAGAGGGGTTAGAGAAGA
AGCAAATCCATGGTGAAATATGTACTGACTTGTTCCAAAGGTCTCTGTCTCCAAGTTCATCAGCAGAA
AGCTCCGTAAAGGGAGATTTTTACTGCAATGAAAAATATTCCTCAGGAGATGACTGTACACATCAACC
TTCAGAGGAAACTACTTCAAATATGGGAGAAATCAAGCCATCATTGGGAGATACTAGTAGTGATGAA
CTAGTGCAATTACATACTGGCAGCAAAGAAGTCCTGGATGATAATGCTAATCCAGCCCATGGCAATG
GCACAGTGCAAATACCTTGCCCCTCTTCAGATCAACTAATGGCAGGAAACCTTAATAAAAAACATGA
AGGAGGAGCTAAAAATATTGAAGTAAAAGATTTGGGATGTTTACGAAGAGATTTCCATTCAGATACG
TCGGCATGTCTCAAAGAATCAACAGAAGAAGGATCTTCTAAGGAAGATTATTATGGCAATGGTAAGG
ATGATGAAGAACAAAGAATATATTTAGGTGTTAATGAAAAACAAAGAAAAAATTTCCAAACAATCTT
ACATGACCAAGAAAGGAAGATGGGTAACCCTAAAATAAGTGTGGCAGGGATTGGAGCTAGTAACAG
AGACCTGGCTACTCTGCTGAGCGAACATACCGCAATCCCCACCCGGGCAATCACAGCAGATGTGTCTC
ATTCACCAAGGACAAATTTAAGTTGGGAAGAAGCTGTGTTAACCCCAGAGCATCATCATTTGACTAGT
GAAGGCAGCGCTTTAGGAGGGATAACTGGTCAAGTTTGTTCATCAAGAACTGGAAATGTTTTGAGGA
ATGATTATCTTTTCCAAGTTGAAGAAAAATCAGGTGGGATTAATTCTGAAGATCAGGATAATAGCCCA
CAGCATAAACAAAGTTGGAATGTTCTGGAAAGTCAGGGAAAATCAAGAGAGAATAAGACAAACATA
ACAGAGCATATCAAAGGACAAACAGATTGTGAAGACGTGTGGGGAAAAAGAGATAATACGAGGAGT
TTGAAAGCTACTACAGAAGAATTGTTTACCTGCCAAGAAACAGTGTGCTGTGAACTGTCTTCTCTAGC
TGATCATGGCATTACTGAGAAAGCAGAAGCTGGTACAGCCTATATAATTAAGACAACATCAGAAAGT
ACTCCAGAAAGCATGTCTGCTAGAGAAAAAGCAATAATTGCTAAGCTACCTCAAGAGACAGCACGAA
GTGACAGGCCCATCGAGGTAAAGGAAACAGCGTTTGATCCACATGAAGGGAGAAATGATGATTCACA
TTATACCCTTTGTCAACGAGATACAGTAGGTGTAATCTATGACAATGATTTTGAAAAGGAATCACGTT
TAGGTATTTGTAATGTACGTGTAGATGAAATGGAGAAGGAAGAAACCATGTCTATGTACAATCCTAG
GAAGACACATGACAGGGAGAAATGTGGCACTGGAAATATAACATCTGTGGAAGAATCCTCATGGGTC
ATTACAGAATATCAAAAAGCAACTTCAAAACTGGATTTACAGTTGGGAATGTTACCAACAGACAAAA
CTGTATTTTCAGAAAACAGAGATCTTAGGCAGGTTCAAGAATTATCAAAGAAAACAGACTCGGATGC
CATTGTGCATTCTGCTTTTAACTCAGACACTAATAGAGCTCCTCAGAATAGCTCTCCTTTTTCCAAACA
TCATACTGAAATTTCAGTGTCAACTAATGAGCAGGCAATTGCTGTAGAGAATGCAGTTACTACCATGG
CTAGCCAACCTATTTCTACGAAATCAGAAAATATTTGTAATTCAACAAGAGAAATCCAGGGTATTGAG
AAGCACCCTTATCCTGAGTCTAAACCTGAAGAAGTTTCCAGAAGTTCAGGAATAGTGACATCAGGTAG
TAGAAAAGAAAGATGCATAGGCCAGATTTTCCAAACAGAAGAGTATAGTGTGGAAAAATCTCTAGGG
CCAATGATTTTAATCAACAAACCTCTTGAGAATATGGAAGAAGCAAGGCATGAAAATGAAGGATTAG
TAAGCTCTGGGCAATCACTATACACTTCAGGTGAAAAGGAATCTGACAGCTCTGCTTCTACTAGTCTT
CCTGTTGAGGAAAGTCAAGCTCAAGGCAACGAATCTTTGTTTTCAAAATATACCAACTCTAAAATACC
TTATTTCCTTTTGTTTCTGATATTTCTTATAACTGTCTACCATTATGACTTAATGATTGGCTTGACATTC
TACGTTTTGTCATTGTCCTGGCTATCCTGGGAAGAGGGTAGACAAAAAGAGTCTGTCAAAAAGAAGTA
ACCTCAGCACTACTATTCTCTCTTAAAAGATAAGCTATTTAACCCCAAACATTTGGATTGGTGAATGG
GACTATTCATTGTTCAAAGATCCAGTGCAGTTTTTCTCTTGAAGGATCATTTAAAAAGGGACGCGAAT
AAGTTTGCTCCTTCATATAAGTAATTATTCTATATAGGACCATTATGTTTGGATCATTAAATACCTATA
TGAATATGAGATCTGAAGCACGTCAAGTTGAAATTAGGTACAGCTGTTGCTCCTTAGCAGGCTATGAA
GTTGCAATGCTTCACATCTCTTCACTACTTAAAGTGCTATTTCTTGCATTCATTTCTCTTGCAATAAAGC
TTCATTTTTTTTTCCCCTTGAGAGTATATATTTTCCCCTACGGTTTTAAAAAACAGATAAAACATGGAC
AATGGCAGAGGACTTTTTTGGTCTTTTAGTATTGAACATGAAATTTGTTCAATTTATCATTTATCAGGA
TTCATTGATCAAATATTTCAACCTTTCATATTTTTAAGAAAACACCCATATATATTGAAATGCAAACTT
AAACATATTCTGTTCACTTGAGTGTAATACTTGATGCATGCACACACACACACACATACCTTCTTTATA
GCTACAAAGTCAGGGCGTTCATAGGCAAAATCTGACAAGACTGAAACAATTGGGAGATTATCTTTCA
ATTCTGAAAAATTCTGTGGGTGGCCTGTCTTTAAGCAATGCTTTTCTCTTGTGAGGGAAGACTGTAACA
CAGCTGAACTATTTCAGTGTCAACTATTCAGAATTGAAAATGTAAATTAAAATTTCCACAAGCATTGC
TTCAGAATGAATTTGTACCTATAAAGCATAAGGCATTAAATGACAATAAAAATTCCAAATGGACTATT
TGTTCCACATTGTATTTTTGTCTTCAAATATTTTCTAAGAGAATGAATTATCCCCC

[0586] In some embodiments, oligonucleotides may have a region of complementarity to a mouse PPP1R3A sequence, for example, as provided below by Gene ID: 140491; NCBI Ref. No: NM_080464.2:

(SEQ ID NO: 963)
ACTCTTATTTGATAAATCAGAGAGACCAATGGAGCCCGCTGAAGAACCTGGTCAGATTAGCAAAGAT
AACTTTTTAGAAGTTCCTAATCTGTCTGATTCTGTGTGTGAGGATGAAGAAGTTAAGGCGACCTTCAA
GCCTGGCTTCTCCCCTCAGCCAAGCAGACGCGGGTCAGGATCTTCGGAAGACATGTATCTGGACACTC
CAACCTCAGCTTCCCGGAGAGTTTCCTTTGCTGACAGCCTGGGATTCAGCCTTGTGTCTGTTAAAGAAT
TTGATTGCTGGGAACTACCCAGTGTTTCAACTGATTTTGACTTAAGTGGGGATGTTTTCCACACAGATG
AATATGTTTTATCTCCACTGTTTGACTTGCCTTCTTCAAAAGAAAAGCTTATGGAACAACTCCAAGTCC
AGAAAGCCGTGCTGGAGTCCGCTGAACACCTTCCCGGGTCAAGCATGAAGGGCATTATTCGAGTCCTG
AACATTTCTTTTGAGAAGTTAGTGTATGTGCGCATGTCTTTGGATGACTGGCAGACACATTATGACATT
TTAGCAGAATATGTTCCTAACTCGTGCGACGGTGAGACTGACCAATTCTCTTTTAAGATTTCATTGGTT
CCACCTTATCAAAAAGAGGGCGGTAAAGTGGAGTTTTGTATACGCTATGAAACTTCTGCTGGCACATT
TTGGTCAAATAATAATGGCACAAATTATATATTGGTTTGTCAAAAGAAGAGGAAGGAGCCAGAGCCT
GTAAAGCCATTGGAAGAAGCACCTAGCAGACAAATAAAAGGCTGCTTAAAGGTAAAATCACGCAGTA
AAGAAGAACCATTGCTAGCACCAGAAGAAAATAAATTTGAGACTTTAAAGTTCACAGAGTCCTACAT
CCCAACAATCATTTGTTCTCACGAGGACAAGGATGACTTGGGAGCCAATCATCCAAATGTAGACGATA
TCAACAAGAAGCATGACGAACACAATGGAAAGGAGCTAGACTTGATGATAAACCAACGGTTAATAAC
TTCCCAGGATGAAAAGAATACATTTGCAACAGATACAGTCAATTTTACAAATAAAGCTGAAGGGTCA
GAGAAGAAGCAAGCTTACCATGAAATCAACACTGACTTGTTCATGGGGCCTTTGTCTCCAAGTTTATC
AGCAGAAAGTTCCTTAAAGCGAGATTTCTATCATAGCAGAAGTTCTTCCCCAGGAAATGAATATGGTC
ATCCACATTCAGAAGAAATTATTTCAGATATGGGAGAAAAAGGTCCATCACTGGGAGACACTAGTTCT
GATGAGTTAATGCAATTGGAACTCTGCAGCAAGGAAGACCTGGATGATAATGCCAACCCAGCCAATG
GGAGTGGCAGAGTGTGCTCTTCCTTCGATCAAAGAATGGCATGTGGTCTCAAGAATAATGAAGCAGG
AATCAAGAAAACTGGAATACAAGATTACAAATATTCACATGGAGATTCCACAAAATTGGAAGAGTCA
AATGCATCTTCCAGAGATGATTATGCCAAAGTCGATAATAAAAAGGAGAAGCAAACATGCTTAGGTG
TTAATGAAAACCCAAGCAAGAATTTTCAATCAGTATTCCAGACCCAAGAGGGACACATGGGGTACCC
AAAAATAAGCACTGAAGGGGATAAAGCTAATAACCAAGACTTGACAAGTCTACTGAGCAAAGATATT
ACAGCTAACACCTGGGCGGTGACAGTGGATCCCTGTCCTTCCACAAATGCAAAAAGGAGTTGGAGAG
AAGTTGGAAGTGGTAGCAATTTAGAACCAGGAACTAGTGATCTTAGTTCTCCAAGGAATTTCAGCCCT
CTGACTGATGATCATCTTTTTCAAGCTGACAGGGAAAACTCAGACTCTAGCAATCCTGAAAATCAGAA
TATGAACACACGACATAGAAAAAAATGGAACGTTCTGGAAACCCAGTCAGAAACAAGTGAGACTGA
ATCAGATATAGCCAAGCATACCAAAGAACAAGCAGAGTATAAAGACATGTGGGAAAAAACAGATAA
CAGTAGGAATCTGAAAGCTACTCCTACAGAACACTTGTTTACCTGCCGAGAGACAGAATGCTACGGA
CTGTCTTCTCTTGCTGATCATGGTATTACTGAGAAAGCACAAGCAGTTACAGCTTATATAATTAAGAC
AACATTAGAAAGTACTCCAGAAAGCGCGTCTGCTAGAGGAAAAGCAATAATTGCTAAGCTACCTCAA
GAGACAGCAGGAAATGACAGGCCCATCGAGGTAAAAGAAACAGCGTTTGATCCACATGAAGGGAGG
AAAGATGATTCACATTATTCCCTTTGTCATGGAGATACAGCAGGTGTAATCCATGACAATGATTTTGA
AAGGGAGTCACATTTAGATATTTGTAATTTACGTGTGGATGAAATGAAGAAGGAGAAAACCACATCT
ACGTGCTTTCCTCAGAAGACATATGACAAGGAGAAACATGGAATTGGAAGTGTAACATCTATAGACG
AACCTTCACAGGTCATTACAGGCAATCAAAAAGCTACGTCAAAACTGGATTTACATTTGGGAGTGTTA
CCAACAGACAGAGCAATATTCCAAGCAAATGCAGATCTTGAGCTGCTTCAAGAATTATCAAGGAGAA
CAGACTTCAACGCCGTTCCCTCTGCATTTAACTCAGACACTGCCAGCGCTTCTCGGGACAGCTCTCAA
GTTTACAGACACTGCTCTAAAAAATCAGTACCTTCTTACGGTGAAGAGAAAGCAGTTACTAACACAAC
CCTCCAGTCTATTCCTACCAAATCAGAATATAATTGGCACCCAGAAAGTGAGGTCTTGGGCCATGCCA
TGTCTAAACCTGAAGATGTTTTCAAAAGTTCAGAAATAATGAAATCAGGTAGTGGAGGAGAACGAGG
CGGGGGTCCGATTCTCCAACAAAAAGAAGGTAGCTTGGAAAACTCCCAGGGCCCGATGTTTTTTACCA
ATGAGCCTCTTGAGAATCTGGATGAAGCAAGTTCTGAAAATGAAGGGTTAATGCATTCTGGACAGTCA
CAGTGTTATCTGGGTGACAAAGGATTAGTGAGCTCTGCTTCTGCTACTGTCTCTACGCAGGAACTCGA
AGCTCAAGGCAGGGAGTCTCTGCTTTCAATATCCACCAACTCTAAAATACCATATTTCCTTTTGTTTCT
GATATTTCTTGCAACTGTCTACTACTATGACTTAATGATAGGCTTGGCGTTCTACCTTTTTTCATTATAC
TGGTTGTACTGGGAAGGGGGGAGGCAAAGAGAGTCTGTTAAGAAAAAGTGAGCTTGGCACAGTTGCT
ATTCTCTCTTGAAAGATAAGCTATTTAGTCCCAAACATTTGGAATGGCAGGAGAGACTATTCATTGTT
CAAAGAATCAGTGCAGTTTTTCTCTTGAAGGATCATTTAAAAAGGAATGCGTATGAAGTTTGCTCCTT
CATATAAGTAATTATTCTATATAGGACCATTATGCTTGGATCATTAAATACCTATATGAATATGAGAT
GTGAAGCACGTCAAGTTGGAATTAGGTACAGCTGTTGCTCCTTAGCAGGCTGTGAAGTTGAAATGCTT
CATGTCTCTTCACTATTTAAAGTGCGATTTCCTGCAATCATTTCTTTCACAGTAAAGCTTTGGATATTTT
TTTTCCCTGAGAGCACTTTCCTCCTAGGTTTTTAAAAAAATAGATAAAACATGGAGAGATATTTTTTCT
TTTAGTCCCTAGAATTTGCCATGAAAATTTCATTTAGCACTGTGTACTCTATCAGCACATATTGATAGA
TCAAATATTAAAATTTCTGTTTATGCCTTTAAGAAAATACCCATGTACTTTGCAATATGAAAACGTAA
ATTGGAAATATGTTTTATGCACACTCACATTATACTTTATGTGCATACCATTGTATCTCTTTGTACCCAT
GATGTCAGGGTTTTCATACACCAATTTTAACTTTGTTTGTTTATTTTTATTTAGTTGAATGTGTAGACTG
TAACACAAATGGACAATTTTAATGTTAAGTGTTGTCCAGACATGAAAATTCTAACATTCTATCATCATT
GTTTCAAGGTGATTTTGCACCTACCTTGTAGTTCTTAACCTGTGGGTTACAACCCCTTTGGAGGCTGCA
TATCAGATATTTATGTTATCATTCACAACAGTGAGCAGAATTACAGTTATGAAGTATAAACAAAACAA
ACTTATGGCTGGGGTCACCACAACATGTGGCACTCTATTAAAGGGTCACAACATTAAAAAGGTTGAG
AACCACTGCTATAGAACATAAGGCCTTAAGTAATAATATAATAGATGCTAAAATGGTTTGTTCTTCCT
GGTAGTTCCTTTGTTTTCGATTAGTTGTTAATATTTTCTTATAGTAGGGAGATGAATTTTATCCTAAGTA
AATTTACAGAACAAACTCCTTGTCTGGTAATATCCATTTTGTCATCTTTGGGTTATGAGACAATCACTC
AAAACTTTAAGCAGGCAAAATATGTATAGTTGAAAGCATACTGAAAACGAAGTGAACATAGACTATA
GCAGTGATTTGGCTACTGTAATTATAGGTAAAGGTATAAAATAATGGAGCATTTTTTAGTTAAATGGA
AATACTGTCAAGATTTATACAAAATTTATTTCAGCAATTTTATTGAATAATTGTAATATACAAAGCCCT
GTGCTATTCTATGGGGGTCCTTAGATAAACTGAGTATATCGATCCCTGTATATAGCAAAATAATGTAT
TTTTAACTGGGTTGGAGTATGAAAAATGTCAGAGAAGGATTCTATTGAATGTTTATCTTTCATGGAAA
GTTCTTTCAGGGAAAGTTAAACAGAAAATAGTATGATATTTTTATTTACTTATAACTATAAAATTACAT
GCCATCTCATATATCTCACAACTATAAAATTATAAGAAAATAAAAATCTTTAAAATGACTTATCATGT
GATACTTAGTGGTTTGCTAAAGTTTCTTTACGTGCACAACTATTTCTCAAACTGGTAATTGCATGCTTT
TCTCAAGGCTCCTTAAAAATGAGTCATTGGCTTTAGCTTTTTAGTTGACCAAATGCAAACATCCTGAA
GTAGAATGCAGGTCAAATATTTGCTTTTTGAGAAGCATACTTCTATCAAATGCAAGTGGAATTCCTTT
AAGCAGTCCTTAGAAATTATCTCTAAAATTGTTGCCCTCATATTTTTTTGTCAGGACTAAGTTAAGTTG
GAGTTAAAGTTAGCATTCCACCAGCTCTTTATAGCTTAGAGGTTTTTCTTAATTCTATGTTTTAAGAGT
TTTAGTCAACATAGCTTATCTCTGTAATGTAAAGGACACTATTTTATGAGCACCGGTGCCCCAAACAG
AATTCTTCCCTTAAATGATCAGCGTAACTCCCTTTCCCTCCTCTATTTGATTTCTGGTAACATTAACTCA
CCAAAGGTTCTCATGCATTTGTAATAAAACAGGAACAAGCTTCAAAGGATTTTAAACACTATTTAGTT
GTGTGTTTCTTTGATGCAAAGAAGAAATACTGGATTGAACTGACTTTTCAAACATTACTTATAGAACTT
TAAATAAAGGTACAAGGACACTTGAAAGGACTGCTCTATGAGGAGGTTGAGTTTGTCAGTCTCTTTTG
GTCACATCTCTATGATGAATAAAAATGAGTGTTAGGATGAACTTGTAGCCTCTGCCGACAAGGACTTG
GCTATGGACCATCTTGGTAAAGGCCATTTTTTTTTTTTTTATCCATAGATGCCAGTTTCACATCTCACCA
CACTTTGACTATGGGTATAATGAGGGCATAGCAGAGTAATTACCAATGAGGATCTTTACATATGCCAT
TCTTATTTTAAATAAGAAATATGATTTAATCATTGCTATCCTTATCTTTCTGGGGTTCTCAGTCTTAGAC
ACGGACCTCTAAAAACTAACTGAGAAGTTTAGCAATGCTATGTAATACAAAACAACAGTCTTTTTAAG
AACTCTGACATCTAGAAGCTATCAACATCACAATAAAATTCTCAACCAGAATAAAATGACTGAGTGGT
TTATATCCACTCTTCAACATTTAGGAATGTTGGGTCAGTAGAACTATATTTTCTTGAGGAGCTCTAATA
CGTGGATAATAAATTTTTCAAGGCCTATCTATAGTCAAATATTTGTCACTATTTTGTCAAAACAGGACG
TTCTTTTACCTCATCTTACACCAGTACTCTGGTTAAGTGAAAACATTGTAAATGGCCAGACCAAATATG
GGGAAATAAGTAAGATATTTTTTCTCTATCCAGTGGTAGTTATAGAGCTTTGAAAATATTTTTGTTTTA
CATTGATGGATGTTAATCCCTTTTATATATTAATAAAGTAAAAAGCTAAACAAACAGAGCTAGGGAAA
ATATCGGAGTTGACTCTACTTATCTCCTTTAAGATAGCAGGCTTTTCTTTTACATGTCCATTGACTCTG
GAAACTGGACTTCACAGTAAGGACCACCTTTTTGGTGTTAACCCTGTCTTAAGTAGTTTCTTGCCAGGC
ACCGCCTCAGTTGTGAATCTCTGGAGAGATTAGTTAAAAGGGTTACTGTTATTCAATTGATTAACCAT
GGTTGCTTTTGTATTTTGGGGGGGGGGTTATAATAAAAATCTTGTCAGCACAACTTAATTTCCATCATT
TGAAACATGTGTGATAAATATTCTACTGTTTATACCACAGGACTCAAACTTTAAAAATTACAAATTGG
ATTTTAAAGAAGCTACCAGCCTAGCTTGGAATGTGCACGTATTTTGAAATAAATTGTTCTATTGTTGTT
GCTAAAACCTTATTAAACAAATATTTAAAATATTAATCAATTTTAAAAGTCCAATATTTTTATTTTATA
TTATTTTAATATGTGGAAAATTATACACAGAACATTGACTTTTCAAAAATTAAACAGTACATTGTGCA
AAACCTTAATAAAAATTTCCCTATGTCGTTTTTACTACATCCAATGTTTGTAAATTGCCAGAAAATAAA
GTAAGATGTCAATTACAGTAAAGGATTCTGGAATCATTTTGACTTAACTAAAGACCTCACAGTAGCCT
GTGATATATAAATAAATCATTTCTCTGGTTTGA

[0587] In some embodiments, an oligonucleotide comprises a region of complementarity to a PPP1R3A sequence as set forth in SEQ ID NO: 962 or SEQ ID NO: 963. In some embodiments, the oligonucleotide comprises a region of complementarity that is at least 80%, 85%, 90%, 95%, 96%, 97%, 98%, 99%, or 100% complementary to a PPP1R3A sequence as set forth in SEQ ID NO: 962 or SEQ ID NO: 963. In some embodiments, the oligonucleotide comprises a sequence that has at least 10, 11, 12, 13, 14, 15, 16, 17, 18, or 19 consecutive nucleotides that are perfectly complementary to a PPP1R3A sequence as set forth in SEQ ID NO: 962 or SEQ ID NO: 963. In some embodiments, an oligonucleotide may comprise a sequence that targets (e.g., is complementary to) an RNA version (i.e., wherein the T's are replaced with U's) of a PPP1R3A sequence as set forth in SEQ ID NO: 962 or SEQ ID NO: 963. In some embodiments, the oligonucleotide comprises a sequence that is complementary (e.g., at least 80%, 85%, 90%, 95%, 96%, 97%, 98%, 99%, or 100% complementary) to an RNA version of a PPP1R3A sequence as set forth in SEQ ID NO: 962 or SEQ ID NO: 963. In some embodiments, the oligonucleotide comprises a sequence that has at least 10, 11, 12, 13, 14, 15, 16, 17, 18, or 19 consecutive nucleotides that are perfectly complementary to an RNA version of a PPP1R3A sequence as set forth in SEQ ID NO: 962 or SEQ ID NO: 963.

[0588] In some embodiments, a PPP1R3A-targeting oligonucleotide comprises an antisense strand that comprises at least 10, 11, 12, 13, 14, 15, 16, 17, 18, or 19 consecutive nucleotides of a sequence comprising any one of SEQ ID NOs: 1012-1035. In some embodiments, a PPP1R3A-targeting oligonucleotide comprises an antisense strand that comprises any one of SEQ ID NOs: 1012-1035. In some embodiments, a PPP1R3A-targeting oligonucleotide comprises an antisense strand that comprises shares at least 70%, 75%, 80%, 85%, 90%, 95%, or 97% sequence identity with at least 12 or at least 15 consecutive nucleotides of any one of SEQ ID NOs: 1012-1035.

[0589] In some embodiments, a PPP1R3A-targeting oligonucleotide comprises an antisense strand that targets a PPP1R3A sequence comprising any one of SEQ ID NOs: 964-1011. In some embodiments, an oligonucleotide comprises an antisense strand comprising at least 10, 11, 12, 13, 14, 15, 16, 17, 18, or 19 nucleotides (e.g., consecutive nucleotides) that are complementary to a PPP1R3A sequence comprising any one of SEQ ID NOs: 964-1011. In some embodiments, a PPP1R3A-targeting oligonucleotide comprises an antisense strand comprising a sequence that is at least 70%, 75%, 80%, 85%, 90%, 95%, or 97% complementary with at least 12 or at least 15 consecutive nucleotides of any one of SEQ ID NOs: 964-1011.

[0590] In some embodiments, a PPP1R3A-targeting oligonucleotide comprises an antisense strand comprises a region of complementarity to a target sequence as set forth in any one of SEQ ID NOs: 964-1011. In some embodiments, the region of complementarity is at least 8, at least 9, at least 10, at least 11, at least 12, at least 13, at least 14, at least 15, at least 16, at least 17, or at least 19 nucleotides in length. In some embodiments, the region of complementarity is 8, 9, 10, 11, 12, 13, 14, 15, 16, 17, 18, or 19 nucleotides in length. In some embodiments, the region of complementarity is in the range of 8 to 20, 10 to 20 or 15 to 20 nucleotides in length. In some embodiments, the region of complementarity is fully complementary with all or a portion of its target sequence. In some embodiments, the region of complementarity includes 1, 2, 3 or more mismatches.

[0591] In some embodiments, a PPP1R3A-targeting oligonucleotide further comprises a sense strand that hybridizes to the antisense strand to form a double stranded siRNA. In some embodiments, the PPP1R3A-targeting oligonucleotide comprises an antisense strand that comprises the nucleotide sequence of any one of SEQ ID NOs: 1012-1035. In some embodiments, the PPP1R3A-targeting oligonucleotide further comprises a sense strand that comprises the nucleotide sequence of any one of SEQ ID NOs: 988-1011.

[0592] In some embodiments, the PPP1R3A-targeing oligonucleotide is a double stranded oligonucleotide (e.g., an siRNA) comprising an antisense strand that comprises the nucleotide sequence of any one of SEQ ID NOs: 1012-1035 and a sense strand that hybridizes to the antisense strand and comprises the nucleotide sequence of any one of SEQ ID NOs: 988-1011, wherein the antisense strand and/or (e.g., and) comprises one or more modified nucleosides (e.g., 2′-modified nucleosides). In some embodiment, the one or more modified nucleosides are selected from 2′-O-Me and 2′-F modified nucleosides.

[0593] In some embodiments, the PPP1R3A-targeing oligonucleotide is a double stranded oligonucleotide (e.g., an siRNA) comprising an antisense strand that comprises the nucleotide sequence of any one of SEQ ID NOs: 1012-1035 and a sense strand that hybridizes to the antisense strand and comprises the nucleotide sequence of any one of SEQ ID NOs: 988-1011, wherein the each nucleoside in the antisense strand and/or (e.g., and) each nucleoside in the sense strand is a 2′-modified nucleoside selected from 2′-O-Me and 2′-F modified nucleosides.

[0594] In some embodiments, the PPP1R3A-targeing oligonucleotide is a double stranded oligonucleotide (e.g., an siRNA) comprising an antisense strand that comprises the nucleotide sequence of any one of SEQ ID NOs: 1012-1035 and a sense strand that hybridizes to the antisense strand and comprises the nucleotide sequence of any one of SEQ ID NOs: 988-1011, wherein the each nucleoside in the antisense strand and each nucleoside in the sense strand is a 2′-modified nucleoside selected from 2′-O-Me and 2′-F modified nucleosides, and wherein the antisense strand and/or (e.g., and) the sense strand each comprises one or more phosphorothioate internucleoside linkages. In some embodiments, the sense strand does not comprise any phosphorothioate internucleoside linkages (all the internucleoside linkages in the sense strand are phosphodiester internucleoside linkages), and the antisense strand comprises 1, 2, or 3 phosphorothioate internucleoside linkages. In some embodiments, the antisense strand comprises 2 phosphorothioate internucleoside linkages, optionally wherein the two internucleoside linkages at the 3′ end of the antisense strand are phosphorothioate internucleoside linkages and the rest of the internucleoside linkages in the antisense strand are phosphodiester internucleoside linkages,

[0595] In some embodiments, the antisense strand of the PPP1R3A-targeing oligonucleotide comprises a structure of (5′ to 3′): fNfNmNfNmNfNmNfNmNfNmNfNmNfNmNfNmNfNmNfNmN*fN*mN, wherein “mN” indicates 2′-O-methyl (2′-O-Me) modified nucleosides; “fN” indicates 2′-fluoro (2′-F) modified nucleosides; “*” indicates phosphrothioate internucleoside linkage; and the absence of “*” between two nucleosides indicate phosphodiester internucleoside linkage.

[0596] In some embodiments, the sense strand of the PPP1R3A-targeing oligonucleotide comprises a structure of (5′ to 3′): mNmNfNmNfNmNfNmNfNmNfNmNfNmNfNmNfNmNfNmNfN, wherein “mN” indicates 2′-O-methyl (2′-O-Me) modified nucleosides; “fN” indicates 2′-fluoro (2′-F) modified nucleosides; and the absence of “*” between two nucleosides indicate phosphodiester internucleoside linkage.

[0597] In some embodiments, the antisense strand of the PPP1R3A-targeing oligonucleotide is selected from the modified version of SEQ ID NOs: 1012-1035 listed in Table 40. In some embodiments, the sense strand of the PPP1R3A-targeing oligonucleotide is selected from the modified version of SEQ ID NOs: 988-1011 listed in Table 40. In some embodiments, the PPP1R3A-targeing oligonucleotide is a siRNA selected from the siRNAs listed in Table 40.

TABLE 38
PPP1R3A Target Sequences

| | Corresponding first | PPP1R3A Target | SEQ |
|---|---|---|---|
| | nucleotide of | Sequence | ID |
| Reference sequence | Reference Sequence | (5′ to 3′) | NO: |
| NM_002711.4 (SEQ | 510 | GGCAGACACATTATGACAT | 964 |
| ID NO: 962) | | | |
| NM_002711.4 (SEQ | 3521 | TTTGCTCCTTCATATAAGT | 965 |
| ID NO: 962) | | | |
| NM_002711.4 (SEQ | 3535 | TAAGTAATTATTCTATATA | 966 |
| ID NO: 962) | | | |
| NM_002711.4 (SEQ | 3534 | ATAAGTAATTATTCTATAT | 967 |
| ID NO: 962) | | | |
| NM_002711.4 (SEQ | 3579 | TACCTATATGAATATGAGA | 968 |
| ID NO: 962) | | | |
| NM_002711.4 (SEQ | 3571 | TCATTAAATACCTATATGA | 969 |
| ID NO: 962) | | | |
| NM_002711.4 (SEQ | 2301 | ACAGGCCCATCGAGGTAAA | 970 |
| ID NO: 962) | | | |
| NM_002711.4 (SEQ | 517 | ACATTATGACATTTTAGCA | 971 |
| ID NO: 962) | | | |
| NM_002711.4 (SEQ | 508 | CTGGCAGACACATTATGAC | 972 |
| ID NO: 962) | | | |
| NM_002711.4 (SEQ | 626 | GTTGAGTTTTGTATACGTT | 973 |
| ID NO: 962) | | | |
| NM_002711.4 (SEQ | 3557 | CCATTATGTTTGGATCATT | 974 |
| ID NO: 962) | | | |
| NM_002711.4 (SEQ | 800 | GAAGAATCATCAGTAACAT | 975 |
| ID NO: 962) | | | |
| NM_002711.4 (SEQ | 745 | GAAAGAAGTTCCTAACAGA | 976 |
| ID NO: 962) | | | |
| NM_002711.4 (SEQ | 4155 | GTCAACTATTCAGAATTGA | 977 |
| ID NO: 962) | | | |
| NM_002711.4 (SEQ | 439 | CAAGGGTATTATTCGAGTT | 978 |
| ID NO: 962) | | | |
| NM_002711.4 (SEQ | 213 | CTGATTCCTTTGGATTCAA | 979 |
| ID NO: 962) | | | |
| NM_002711.4 (SEQ | 2382 | GAGATACAGTAGGTGTAAT | 980 |
| ID NO: 962) | | | |
| NM_080464.2 (SEQ | 3485 | CTTGGATCATTAAATACCT | 981 |
| ID NO: 963) | | | |
| NM_080464.2 (SEQ | 2264 | GACAGGCCCATCGAGGTAA | 982 |
| ID NO: 963) | | | |
| NM_080464.2 (SEQ | 3477 | CCATTATGCTTGGATCATT | 983 |
| ID NO: 963) | | | |
| NM_080464.2 (SEQ | 2461 | GGAGAAACATGGAATTGGA | 984 |
| ID NO: 963) | | | |
| NM_080464.2 (SEQ | 2367 | GGGAGTCACATTTAGATAT | 985 |
| ID NO: 963) | | | |
| NM_080464.2 (SEQ | 219 | GGAGAGTTTCCTTTGCTGA | 986 |
| ID NO: 963) | | | |
| NM_080464.2 (SEQ | 5173 | CTTAGAAATTATCTCTAAA | 987 |
| ID NO: 963) | | | |

*The target sequences contain Ts, but binding to RNA and/or DNA is contemplated.

[0598] In some embodiments, an oligonucleotide may comprise or consist of any sequence as provided in Table 39.

TABLE 39
Oligonucleotide sequences for targeting PPP1R3A

| Passenger Strand/ | | Guide Strand/ | |
|---|---|---|---|
| Sense Strand | SEQ ID | Antisense Strand | SEQ ID |
| (RNA) (5′ to 3′) | NO: | (RNA) (5′ to 3′) | NO: |
| CUGGCAGACACAUUAUGACAU | 988 | AUGUCAUAAUGUGUCUGCCAGUC | 1012 |
| AGUUUGCUCCUUCAUAUAAGU | 989 | ACUUAUAUGAAGGAGCAAACUUA | 1013 |
| UAUAAGUAAUUAUUCUAUAUA | 990 | UAUAUAGAAUAAUUACUUAUAUG | 1014 |
| AUAUAAGUAAUUAUUCUAUAU | 991 | AUAUAGAAUAAUUACUUAUAUGA | 1015 |
| AAUACCUAUAUGAAUAUGAGA | 992 | UCUCAUAUUCAUAUAGGUAUUUA | 1016 |
| GAUCAUUAAAUACCUAUAUGA | 993 | UCAUAUAGGUAUUUAAUGAUCCA | 1017 |
| UGACAGGCCCAUCGAGGUAAA | 994 | UUUACCUCGAUGGGCCUGUCACU | 1018 |
| ACACAUUAUGACAUUUUAGCA | 995 | UGCUAAAAUGUCAUAAUGUGUCU | 1019 |
| GACUGGCAGACACAUUAUGAC | 996 | GUCAUAAUGUGUCUGCCAGUCAU | 1020 |
| AAGUUGAGUUUUGUAUACGUU | 997 | AACGUAUACAAAACUCAACUUUA | 1021 |
| GACCAUUAUGUUUGGAUCAUU | 998 | AAUGAUCCAAACAUAAUGGUCCU | 1022 |
| AAGAAGAAUCAUCAGUAACAU | 999 | AUGUUACUGAUGAUUCUUCUUUA | 1023 |
| UGGAAAGAAGUUCCUAACAGA | 1000 | UCUGUUAGGAACUUCUUUCCAUG | 1024 |
| GUGUCAACUAUUCAGAAUUGA | 1001 | UCAAUUCUGAAUAGUUGACACUG | 1025 |
| AUCAAGGGUAUUAUUCGAGUU | 1002 | AACUCGAAUAAUACCCUUGAUAC | 1026 |
| UGCUGAUUCCUUUGGAUUCAA | 1003 | UUGAAUCCAAAGGAAUCAGCAAA | 1027 |
| ACGAGAUACAGUAGGUGUAAU | 1004 | AUUACACCUACUGUAUCUCGUUG | 1028 |
| UGCUUGGAUCAUUAAAUACCU | 1005 | AGGUAUUUAAUGAUCCAAGCAUA | 1029 |
| AUGACAGGCCCAUCGAGGUAA | 1006 | UUACCUCGAUGGGCCUGUCAUUU | 1030 |
| GACCAUUAUGCUUGGAUCAUU | 1007 | AAUGAUCCAAGCAUAAUGGUCCU | 1031 |
| AAGGAGAAACAUGGAAUUGGA | 1008 | UCCAAUUCCAUGUUUCUCCUUGU | 1032 |
| AAGGGAGUCACAUUUAGAUAU | 1009 | AUAUCUAAAUGUGACUCCCUUUC | 1033 |
| CCGGAGAGUUUCCUUUGCUGA | 1010 | UCAGCAAAGGAAACUCUCCGGGA | 1034 |
| UCCUUAGAAAUUAUCUCUAAA | 1011 | UUUAGAGAUAAUUUCUAAGGACU | 1035 |

[0599] In some embodiments, an oligonucleotide is a modified oligonucleotide as provided in Table 40, wherein ‘mN’ represents a 2′-O-methyl modified nucleoside (e.g., mU is 2′-O-methyl modified uridine), ‘fN’ represents a 2′-fluoro modified nucleoside (e.g., fU is 2′-fluoro modified uridine), ‘*’ represents a phosphorothioate internucleoside linkage, and lack of “*” between nucleosides indicate phosphodiester internucleoside linkage.

TABLE 40
Modified Oligonucleotides for targeting PPP1R3A

| | Modified Passenger | | Modified Guide | |
|---|---|---|---|---|
| | Strand/Sense Strand | SEQ | Strand/Antisense Strand | SEQ |
| siRNA # | (RNA) (5′ to 3′) | ID NO: | (RNA) (5′ to 3′) | ID NO: |
| hsPPP1R3A-1 | mCmUfGmGfCmAfGmAfC | 988 | fAfUmGfUmCfAmUfAmAfUm | 1012 |
| | mAfCmAfUmUfAmUfGmA | | GfUmGfUmCfUmGfCmCfAmG | |
| | fCmAfU | | *fU*mC | |
| hsPPP1R3A-2 | mAmGfUmUfUmGfCmUfC | 989 | fAfCmUfUmAfUmAfUmGfAm | 1013 |
| | mCfUmUfCmAfUmAfUmAf | | AfGmGfAmGfCmAfAmAfCmU | |
| | AmGfU | | *fU*mA | |
| hsPPP1R3A-3 | mUmAfUmAfAmGfUmAfA | 990 | fUfAmUfAmUfAmGfAmAfUm | 1014 |
| | mUfUmAfUmUfCmUfAmU | | AfAmUfUmAfCmUfUmAfUmA | |
| | fAmUfA | | *fU*mG | |
| hsPPP1R3A-4 | mAmUfAmUfAmAfGmUfA | 991 | fAfUmAfUmAfGmAfAmUfAm | 1015 |
| | mAfUmUfAmUfUmCfUmA | | AfUmUfAmCfUmUfAmUfAmU | |
| | fUmAfU | | *fG*mA | |
| hsPPP1R3A-5 | mAmAfUmAfCmCfUmAfU | 992 | fUfCmUfCmAfUmAfUmUfCmA | 1016 |
| | mAfUmGfAmAfUmAfUmG | | fUmAfUmAfGmGfUmAfUmU*f | |
| | fAmGfA | | U*mA | |
| hsPPP1R3A-6 | mGmAfUmCfAmUfUmAfA | 993 | fUfCmAfUmAfUmAfGmGfUm | 1017 |
| | mAfUmAfCmCfUmAfUmAf | | AfUmUfUmAfAmUfGmAfUmC | |
| | UmGfA | | *fC*mA | |
| hsPPP1R3A-7 | mUmGfAmCfAmGfGmCfC | 994 | fUfUmUfAmCfCmUfCmGfAmU | 1018 |
| | mCfAmUfCmGfAmGfGmUf | | fGmGfGmCfCmUfGmUfCmA*f | |
| | AmAfA | | C*mU | |
| hsPPP1R3A-8 | mAmCfAmCfAmUfUmAfU | 995 | fUfGmCfUmAfAmAfAmUfGm | 1019 |
| | mGfAmCfAmUfUmUfUmA | | UfCmAfUmAfAmUfGmUfGmU | |
| | fGmCfA | | *fC*mU | |
| hsPPP1R3A-9 | mGmAfCmUfGmGfCmAfG | 996 | fGfUmCfAmUfAmAfUmGfUm | 1020 |
| | mAfCmAfCmAfUmUfAmUf | | GfUmCfUmGfCmCfAmGfUmC | |
| | GmAfC | | *fA*mU | |
| hsPPP1R3A- | mAmAfGmUfUmGfAmGfU | 997 | fAfAmCfGmUfAmUfAmCfAmA | 1021 |
| 10 | mUfUmUfGmUfAmUfAmC | | fAmAfCmUfCmAfAmCfUmU*f | |
| | fGmUfU | | U*mA | |
| hsPPP1R3A- | mGmAfCmCfAmUfUmAfU | 998 | fAfAmUfGmAfUmCfCmAfAmA | 1022 |
| 11 | mGfUmUfUmGfGmAfUmC | | fCmAfUmAfAmUfGmGfUmC*f | |
| | fAmUfU | | C*mU | |
| hsPPP1R3A- | mAmAfGmAfAmGfAmAfU | 999 | fAfUmGfUmUfAmCfUmGfAm | 1023 |
| 12 | mCfAmUfCmAfGmUfAmAf | | UfGmAfUmUfCmUfUmCfUmU | |
| | CmAfU | | *fU*mA | |
| hsPPP1R3A- | mUmGfGmAfAmAfGmAfA | 1000 | fUfCmUfGmUfUmAfGmGfAm | 1024 |
| 13 | mGfUmUfCmCfUmAfAmCf | | AfCmUfUmCfUmUfUmCfCmA | |
| | AmGfA | | *fU*mG | |
| hsPPP1R3A- | mGmUfGmUfCmAfAmCfU | 1001 | fUfCmAfAmUfUmCfUmGfAmA | 1025 |
| 14 | mAfUmUfCmAfGmAfAmU | | fUmAfGmUfUmGfAmCfAmC*f | |
| | fUmGfA | | U*mG | |
| hsPPP1R3A- | mAmUfCmAfAmGfGmGfU | 1002 | fAfAmCfUmCfGmAfAmUfAmA | 1026 |
| 15 | mAfUmUfAmUfUmCfGmA | | fUmAfCmCfCmUfUmGfAmU*f | |
| | fGmUfU | | A*mC | |
| hsPPP1R3A- | mUmGfCmUfGmAfUmUfC | 1003 | fUfUmGfAmAfUmCfCmAfAmA | 1027 |
| 16 | mCfUmUfUmGfGmAfUmU | | fGmGfAmAfUmCfAmGfCmA*f | |
| | fCmAfA | | A*mA | |
| hsPPP1R3A- | mAmCfGmAfGmAfUmAfC | 1004 | fAfUmUfAmCfAmCfCmUfAmC | 1028 |
| 17 | mAfGmUfAmGfGmUfGmU | | fUmGfUmAfUmCfUmCfGmU*f | |
| | fAmAfU | | U*mG | |
| mmPPP1R3A- | mUmGfCmUfUmGfGmAfU | 1005 | fAfGmGfUmAfUmUfUmAfAm | 1029 |
| 1 | mCfAmUfUmAfAmAfUmA | | UfGmAfUmCfCmAfAmGfCmA | |
| | fCmCfU | | *fU*mA | |
| mmPPP1R3A- | mAmUfGmAfCmAfGmGfC | 1006 | fUfUmAfCmCfUmCfGmAfUmG | 1030 |
| 2 | mCfCmAfUmCfGmAfGmGf | | fGmGfCmCfUmGfUmCfAmU*f | |
| | UmAfA | | U*mU | |
| mmPPP1R3A- | mGmAfCmCfAmUfUmAfU | 1007 | fAfAmUfGmAfUmCfCmAfAmG | 1031 |
| 3 | mGfCmUfUmGfGmAfUmCf | | fCmAfUmAfAmUfGmGfUmC*f | |
| | AmUfU | | C*mU | |
| mmPPP1R3A- | mAmAfGmGfAmGfAmAfA | 1008 | fUfCmCfAmAfUmUfCmCfAmU | 1032 |
| 4 | mCfAmUfGmGfAmAfUmU | | fGmUfUmUfCmUfCmCfUmU*f | |
| | fGmGfA | | G*mU | |
| mmPPP1R3A- | mAmAfGmGfGmAfGmUfC | 1009 | fAfUmAfUmCfUmAfAmAfUm | 1033 |
| 5 | mAfCmAfUmUfUmAfGmA | | GfUmGfAmCfUmCfCmCfUmU | |
| | fUmAfU | | *fU*mC | |
| mmPPP1R3A- | mCmCfGmGfAmGfAmGfU | 1010 | fUfCmAfGmCfAmAfAmGfGmA | 1034 |
| 6 | mUfUmCfCmUfUmUfGmCf | | fAmAfCmUfCmUfCmCfGmG*f | |
| | UmGfA | | G*mA | |
| mmPPP1R3A- | mUmCfCmUfUmAfGmAfA | 1011 | fUfUmUfAmGfAmGfAmUfAm | 1035 |
| 7 | mAfUmUfAmUfCmUfCmUf | | AfUmUfUmCfUmAfAmGfGmA | |
| | AmAfA | | *fC*mU | |

[0600] In some embodiments, any one of the MSTN targeting oligonucleotides, INHBA targeting oligonucleotides, ACVR1B targeting oligonucleotides, MLCK1 targeting oligonucleotides, ACVR1 targeting oligonucleotides, FBXO32 oligonucleotides, TRIM63 oligonucleotides, MEF21D targeting oligonucleotides, KLF15 targeting oligonucleotides, MED1 targeting oligonucleotides, MED13 targeting oligonucleotides, or PPP1R3A targeting oligonucleotides can be in salt form, e.g., as sodium, potassium, or magnesium salts.

[0601] In some embodiments, the 5′ or 3′ nucleoside (e.g., terminal nucleoside) of any one of the oligonucleotides described herein (e.g., the oligonucleotides listed in Tables 9, 10, 12, 13, 15, 16, 18, 19, 21, 22, 24, 25, 27, 28, 30, 21, 33, 34, 36, 37, 39, and 40) is conjugated to an amine group, optionally via a spacer. In some embodiments, the spacer comprises an aliphatic moiety. In some embodiments, the spacer comprises a polyethylene glycol moiety. In some embodiments, a phosphodiester linkage is present between the spacer and the 5′ or 3′ nucleoside of the oligonucleotide. In some embodiments, the 5′ or 3′ nucleoside (e.g., terminal nucleoside) of any of the oligonucleotides described herein (e.g., the oligonucleotides listed in Tables 9, 10, 12, 13, 15, 16, 18, 19, 21, 22, 24, 25, 27, 28, 30, 31, 33, 34, 36, 37, 39, and 40) is conjugated to a spacer that is a substituted or unsubstituted aliphatic, substituted or unsubstituted heteroaliphatic, substituted or unsubstituted carbocyclylene, substituted or unsubstituted heterocyclylene, substituted or unsubstituted arylene, substituted or unsubstituted heteroarylene, —O—, —N(R^{A})—, —S—, —C(═O)—, —C(═O)O—, —C(═O)NR^{A}—, —NR^{A}C(═O)—, —NR^{A}C(═O)R^{A}—, —C(═O)R^{A}—, —NR^{A}C(═O)O—, —NR^{A}C(═O)N(R^{A})—, —OC(═O)—, —OC(═O)O—, —OC(═O)N(R^{A})—, —S(O)₂NR^{A}—, —NR^{A}S(O)₂—, or a combination thereof; each R^{A} is independently hydrogen or substituted or unsubstituted alkyl. In certain embodiments, the spacer is a substituted or unsubstituted alkylene, substituted or unsubstituted heterocyclylene, substituted or unsubstituted heteroarylene, —O—, —N(R^{A})—, or —C(═O)N(R^{A})₂, or a combination thereof.

[0602] In some embodiments, the 5′ or 3′ nucleoside of any one of the oligonucleotides described herein (e.g., the oligonucleotides listed in Tables 9, 10, 12, 13, 15, 16, 18, 19, 21, 22, 24, 25, 27, 28, 30, 31, 33, 34, 36, 37, 39, and 40) is conjugated to a compound of the formula —NH₂—(CH₂)ₙ—, wherein n is an integer from 1 to 12. In some embodiments, n is 6, 7, 8, 9, 10, 11, or 12. In some embodiments, a phosphodiester linkage is present between the compound of the formula NH₂—(CH₂)ₙ— and the 5′ or 3′ nucleoside of the oligonucleotide. In some embodiments, a compound of the formula NH₂—(CH₂)₆— is conjugated to the oligonucleotide via a reaction between 6-amino-1-hexanol (NH₂—(CH₂)₆—OH) and the 5′ phosphate of the oligonucleotide.

[0603] In some embodiments, the oligonucleotide is conjugated to a targeting agent, e.g., a muscle targeting agent such as an anti-TfR1 antibody, e.g., via the amine group.

[0604] m. Oligonucleotide Size/Sequence

[0605] Oligonucleotides may be of a variety of different lengths, e.g., depending on the format. In some embodiments, an oligonucleotide is 7, 8, 9, 10, 11, 12, 13, 14, 15, 16, 17, 18, 19, 20, 21, 22, 23, 24, 25, 26, 27, 28, 29, 30, 35, 40, 45, 50, 75, or more nucleotides in length. In some embodiments, the oligonucleotide is 8 to 50 nucleotides in length, 8 to 40 nucleotides in length, 8 to 30 nucleotides in length, 10 to 15 nucleotides in length, 10 to 20 nucleotides in length, 15 to 25 nucleotides in length, 21 to 23 nucleotides in lengths, 20 to 25 nucleotides in length, etc.

[0606] In some embodiments, a nucleic acid sequence of an oligonucleotide for purposes of the present disclosure is “complementary” to a target nucleic acid when it is specifically hybridizable to the target nucleic acid. In some embodiments, an oligonucleotide hybridizing to a target nucleic acid (e.g., an mRNA or pre-mRNA molecule) results in modulation of activity or expression of the target (e.g., decreased mRNA translation, altered pre-mRNA splicing, exon skipping, target mRNA degradation, etc.). In some embodiments, a nucleic acid sequence of an oligonucleotide has a sufficient degree of complementarity to its target nucleic acid such that it does not hybridize non-target sequences under conditions in which avoidance of non-specific binding is desired, e.g., under physiological conditions.

[0607] In some embodiments, a complementary nucleic acid sequence of an oligonucleotide for purposes of the present disclosure is specifically hybridizable or specific for the target nucleic acid when binding of the sequence to the target molecule (e.g., mRNA) interferes with the normal function of the target (e.g., mRNA) to cause a loss of activity (e.g., inhibiting translation) or expression (e.g., degrading a target mRNA) and there is a sufficient degree of complementarity to avoid non-specific binding of the sequence to non-target sequences under conditions in which avoidance of non-specific binding is desired, e.g., under physiological conditions in the case of in vivo assays or therapeutic treatment, and in the case of in vitro assays, under conditions in which the assays are performed under suitable conditions of stringency. Thus, in some embodiments, an oligonucleotide may be at least 80%, at least 85%, at least 90%, at least 91%, at least 92%, at least 93%, at least 94%, at least 95%, at least 96%, at least 97%, at least 98%, at least 99% or 100% complementary to the consecutive nucleotides of a target nucleic acid. In some embodiments a complementary nucleotide sequence need not be 100% complementary to that of its target to be specifically hybridizable or specific for a target nucleic acid. In certain embodiments, oligonucleotides comprise one or more mismatched nucleobases relative to the target nucleic acid. In certain embodiments, activity relating to the target is reduced by such mismatch, but activity relating to a non-target is reduced by a greater amount (i.e., selectivity for the target nucleic acid is increased and off-target effects are decreased).

[0608] In some embodiments, an oligonucleotide comprises region of complementarity to a target nucleic acid that is in the range of 8 to 15, 8 to 30, 8 to 40, or 10 to 50, or 5 to 50, or 5 to 40 nucleotides in length. In some embodiments, a region of complementarity of an oligonucleotide to a target nucleic acid is 5, 6, 7, 8, 9, 10, 11, 12, 13, 14, 15, 16, 17, 18, 19, 20, 21, 22, 23, 24, 25, 26, 27, 28, 29, 30, 31, 32, 33, 34, 35, 36, 37, 38, 39, 40, 41, 42, 43, 44, 45, 46, 47, 48, 49, or 50 nucleotides in length. In some embodiments, the region of complementarity is complementary with at least 8 consecutive nucleotides of a target nucleic acid. In some embodiments, an oligonucleotide may contain 1, 2 or 3 base mismatches compared to the portion of the consecutive nucleotides of target nucleic acid. In some embodiments the oligonucleotide may have up to 3 mismatches over 15 bases, or up to 2 mismatches over 10 bases.

[0609] In some embodiments, the oligonucleotide comprises an antisense strand that is complementary (e.g., at least 85% at least 90%, at least 95%, or 100%) to a target sequence of any one of the antisense strands provided herein (e.g., the antisense strands listed in Tables 9, 10, 12, 13, 15, and 16). In some embodiments, the oligonucleotide comprises an antisense strand that is complementary (e.g., at least 85% at least 90%, at least 95%, or 100%) to a target sequence of any one of the antisense strands provided herein (e.g., the antisense strands listed in Tables 18, 19, 21, 22, 24, 25, 27, 28, 30, 31, 33, 34, 36, 37, 39, and 40). In some embodiments, such target sequence is 100% complementary to the oligonucleotide listed in Tables 9, 10, 12, 13, 15, and 16. In some embodiments, such target sequence is 100% complementary to the oligonucleotide listed in Tables 18, 19, 21, 22, 24, 25, 27, 28, 30, 31, 33, 34, 36, 37, 39, and 40. In some embodiments, the oligonucleotide is an siRNA molecule comprising an antisense strand comprising a nucleotide sequence that is complementary (e.g., at least 85%, at least 90%, at least 95%, or 100%) to the target RNA sequence of the oligonucleotides provided herein (e.g., in Tables 8, 11, and 14). In some embodiments, the oligonucleotide is an siRNA molecule comprising an antisense strand comprising a nucleotide sequence that is complementary (e.g., at least 85%, at least 90%, at least 95%, or 100%) to the target RNA sequence of the oligonucleotides provided herein (e.g., in Tables 17, 20, 23, 26, 29, 32, 35, and 38).

[0610] In some embodiments, it should be appreciated that methylation of the nucleobase uracil at the C5 position forms thymine. Thus, in some embodiments, a nucleotide or nucleoside having a C5 methylated uracil (or 5-methyl-uracil) may be equivalently identified as a thymine nucleotide or nucleoside.

[0611] In some embodiments, any one or more of the thymine bases (T's) in any one of the oligonucleotides provided herein (e.g., the oligonucleotides listed in Tables 9, 10, 12, 13, 15, and 16) may optionally be uracil bases (U's), and/or any one or more of the U's may optionally be T's. In some embodiments, any one or more of the thymine bases (T's) in any one of the oligonucleotides provided herein (e.g., the oligonucleotides listed in Tables 18, 19, 21, 22, 24, 25, 27, 28, 30, 31, 33, 34, 36, 37, 39, and 40) may optionally be uracil bases (U's), and/or any one or more of the U's may optionally be T's.

[0612] n. Oligonucleotide Modifications:

[0613] The oligonucleotides described herein may be modified, e.g., comprise a modified sugar moiety, a modified internucleoside linkage, a modified nucleotide or nucleoside and/or (e.g., and) combinations thereof. In addition, in some embodiments, oligonucleotides may exhibit one or more of the following properties: do not mediate alternative splicing; are not immune stimulatory; are nuclease resistant; have improved cell uptake compared to unmodified oligonucleotides; are not toxic to cells or mammals; have improved endosomal exit internally in a cell; minimizes TLR stimulation; or avoid pattern recognition receptors. Any of the modified chemistries or formats of oligonucleotides described herein can be combined with each other. For example, one, two, three, four, five, or more different types of modifications can be included within the same oligonucleotide.

[0614] In some embodiments, certain nucleotide or nucleoside modifications may be used that make an oligonucleotide into which they are incorporated more resistant to nuclease digestion than the native oligodeoxynucleotide or oligoribonucleotide molecules; these modified oligonucleotides survive intact for a longer time than unmodified oligonucleotides. Specific examples of modified oligonucleotides include those comprising modified backbones, for example, modified internucleoside linkages such as phosphorothioates, phosphotriesters, methyl phosphonates, short chain alkyl or cycloalkyl intersugar linkages or short chain heteroatomic or heterocyclic intersugar linkages. Accordingly, oligonucleotides of the disclosure can be stabilized against nucleolytic degradation such as by the incorporation of a modification, e.g., a nucleotide or nucleoside modification.

[0615] In some embodiments, an oligonucleotide may be of up to 50 or up to 100 nucleotides in length in which 2 to 10, 2 to 15, 2 to 16, 2 to 17, 2 to 18, 2 to 19, 2 to 20, 2 to 25, 2 to 30, 2 to 40, 2 to 45, or more nucleotides or nucleosides of the oligonucleotide are modified nucleotides/nucleosides. The oligonucleotide may be of 8 to 30 nucleotides in length in which 2 to 10, 2 to 15, 2 to 16, 2 to 17, 2 to 18, 2 to 19, 2 to 20, 2 to 25, 2 to 30 nucleotides or nucleosides of the oligonucleotide are modified nucleotides/nucleosides. The oligonucleotide may be of 8 to 15 nucleotides in length in which 2 to 4, 2 to 5, 2 to 6, 2 to 7, 2 to 8, 2 to 9, 2 to 10, 2 to 11, 2 to 12, 2 to 13, 2 to 14 nucleotides or nucleosides of the oligonucleotide are modified nucleotides/nucleosides. Optionally, the oligonucleotides may have every nucleotide or nucleoside except 1, 2, 3, 4, 5, 6, 7, 8, 9, or 10 nucleotides/nucleosides modified. Oligonucleotide modifications are described further herein.

[0616] o. Modified Nucleosides

[0617] In some embodiments, the oligonucleotide described herein comprises at least one nucleoside modified at the 2′ position of the sugar. In some embodiments, an oligonucleotide comprises at least one 2′-modified nucleoside. In some embodiments, all of the nucleosides in the oligonucleotide are 2′-modified nucleosides.

[0618] In some embodiments, the oligonucleotide described herein comprises one or more non-bicyclic 2′-modified nucleosides, e.g., 2′-deoxy, 2′-fluoro (2′-F), 2′-O-methyl (2′-O-Me), 2′-O-methoxyethyl (2′-MOE), 2′-O-aminopropyl (2′-O-AP), 2′-O-dimethylaminoethyl (2′-O-DMAOE), 2′-O-dimethylaminopropyl (2′-O-DMAP), 2′-O-dimethylaminoethyloxyethyl (2′-O-DMAEOE), or 2′-O—N-methylacetamido (2′-O-NMA) modified nucleoside.

[0619] In some embodiments, the oligonucleotide described herein comprises one or more 2′-4′ bicyclic nucleosides in which the ribose ring comprises a bridge moiety connecting two atoms in the ring, e.g., connecting the 2′-O atom to the 4′-C atom via a methylene (LNA) bridge, an ethylene (ENA) bridge, or a (S)-constrained ethyl (cEt) bridge. Examples of LNAs are described in International Patent Application Publication WO/2008/043753, published on Apr. 17, 2008, and entitled “RNA Antagonist Compounds For The Modulation Of PCSK9”, the contents of which are incorporated herein by reference in its entirety. Examples of ENAs are provided in International Patent Publication No. WO 2005/042777, published on May 12, 2005, and entitled “APP/ENA Antisense”; Morita et al., Nucleic Acid Res., Suppl 1:241-242, 2001; Surono et al., Hum. Gene Ther., 15:749-757, 2004; Koizumi, Curr. Opin. Mol. Ther., 8:144-149, 2006 and Horie et al., Nucleic Acids Symp. Ser (Oxf), 49:171-172, 2005; the disclosures of which are incorporated herein by reference in their entireties. Examples of cEt are provided in U.S. Pat. Nos. 7,101,993; 7,399,845 and 7,569,686, each of which is herein incorporated by reference in its entirety.

[0620] In some embodiments, the oligonucleotide comprises a modified nucleoside disclosed in one of the following United States patent or patent Application Publications: U.S. Pat. No. 7,399,845, issued on Jul. 15, 2008, and entitled “6-Modified Bicyclic Nucleic Acid Analogs”; U.S. Pat. No. 7,741,457, issued on Jun. 22, 2010, and entitled “6-Modified Bicyclic Nucleic Acid Analogs”; U.S. Pat. No. 8,022,193, issued on Sep. 20, 2011, and entitled “6-Modified Bicyclic Nucleic Acid Analogs”; U.S. Pat. No. 7,569,686, issued on Aug. 4, 2009, and entitled “Compounds And Methods For Synthesis Of Bicyclic Nucleic Acid Analogs”; U.S. Pat. No. 7,335,765, issued on Feb. 26, 2008, and entitled “Novel Nucleoside And Oligonucleotide Analogues”; U.S. Pat. No. 7,314,923, issued on Jan. 1, 2008, and entitled “Novel Nucleoside And Oligonucleotide Analogues”; U.S. Pat. No. 7,816,333, issued on Oct. 19, 2010, and entitled “Oligonucleotide Analogues And Methods Utilizing The Same” and US Publication Number 2011/0009471 now U.S. Pat. No. 8,957,201, issued on Feb. 17, 2015, and entitled “Oligonucleotide Analogues And Methods Utilizing The Same”, the entire contents of each of which are incorporated herein by reference for all purposes.

[0621] In some embodiments, the oligonucleotide comprises at least one modified nucleoside that results in an increase in Tm of the oligonucleotide in a range of 1° C., 2° C., 3° C., 4° C., or 5° C. compared with an oligonucleotide that does not have the at least one modified nucleoside. The oligonucleotide may have a plurality of modified nucleosides that result in a total increase in Tm of the oligonucleotide in a range of 2° C., 3° C., 4° C., 5° C., 6° C., 7° C., 8° C., 9° C., 10° C., 15° C., 20° C., 25° C., 30° C., 35° C., 40° C., 45° C. or more compared with an oligonucleotide that does not have the modified nucleoside.

[0622] The oligonucleotide may comprise a mix of nucleosides of different kinds. For example, an oligonucleotide may comprise a mix of 2′-deoxyribonucleosides or ribonucleosides and 2′-fluoro modified nucleosides. An oligonucleotide may comprise a mix of deoxyribonucleosides or ribonucleosides and 2′-O-Me modified nucleosides. An oligonucleotide may comprise a mix of 2′-fluoro modified nucleosides and 2′-O-Me modified nucleosides. An oligonucleotide may comprise a mix of 2′-4′ bicyclic nucleosides and 2′-MOE, 2′-fluoro, or 2′-O-Me modified nucleosides. An oligonucleotide may comprise a mix of non-bicyclic 2′-modified nucleosides (e.g., 2′-MOE, 2′-fluoro, or 2′-O-Me) and 2′-4′ bicyclic nucleosides (e.g., LNA, ENA, cEt).

[0623] The oligonucleotide may comprise alternating nucleosides of different kinds. For example, an oligonucleotide may comprise alternating 2′-deoxyribonucleosides or ribonucleosides and 2′-fluoro modified nucleosides. An oligonucleotide may comprise alternating deoxyribonucleosides or ribonucleosides and 2′-O-Me modified nucleosides. An oligonucleotide may comprise alternating 2′-fluoro modified nucleosides and 2′-O-Me modified nucleosides. An oligonucleotide may comprise alternating 2′-4′ bicyclic nucleosides and 2′-MOE, 2′-fluoro, or 2′-O-Me modified nucleosides. An oligonucleotide may comprise alternating non-bicyclic 2′-modified nucleosides (e.g., 2′-MOE, 2′-fluoro, or 2′-O-Me) and 2′-4′ bicyclic nucleosides (e.g., LNA, ENA, cEt).

[0624] In some embodiments, an oligonucleotide described herein comprises a 5′-vinylphosphonate modification, one or more abasic residues, and/or one or more inverted abasic residues.

[0625] p. Internucleotide Linkages/Backbones

[0626] In some embodiments, oligonucleotide may contain a phosphorothioate or other modified internucleoside linkage. In some embodiments, the oligonucleotide comprises phosphorothioate internucleoside linkages. In some embodiments, the oligonucleotide comprises phosphorothioate internucleoside linkages between at least two nucleosides. In some embodiments, the oligonucleotide comprises phosphorothioate internucleoside linkages between all nucleosides. For example, in some embodiments, oligonucleotides comprise modified internucleoside linkages at the first, second, and/or (e.g., and) third internucleoside linkage at the 5′ or 3′ end of the nucleotide sequence.

[0627] Phosphorus-containing linkages that may be used include, but are not limited to, phosphorothioates, chiral phosphorothioates, phosphorodithioates, phosphotriesters, aminoalkylphosphotriesters, methyl and other alkyl phosphonates comprising 3′alkylene phosphonates and chiral phosphonates, phosphinates, phosphoramidates comprising 3′-amino phosphoramidate and aminoalkylphosphoramidates, thionophosphoramidates, thionoalkylphosphonates, thionoalkylphosphotriesters, and boranophosphates having normal 3′-5′ linkages, 2′-5′ linked analogs of these, and those having inverted polarity wherein the adjacent pairs of nucleoside units are linked 3′-5′ to 5′-3′ or 2′-5′ to 5′-2′; see U.S. Pat. Nos. 3,687,808; 4,469,863; 4,476,301; 5,023,243; 5,177,196; 5,188,897; 5,264,423; 5,276,019; 5,278,302; 5,286,717; 5,321,131; 5,399,676; 5,405,939; 5,453,496; 5,455,233; 5,466,677; 5,476,925; 5,519,126; 5,536,821; 5,541,306; 5,550,111; 5,563,253; 5,571,799; 5,587,361; and 5,625,050.

[0628] In some embodiments, oligonucleotides may have heteroatom backbones, such as methylene(methylimino) or MMI backbones; amide backbones (see De Mesmaeker et al. Ace. Chem. Res. 1995, 28:366-374); morpholino backbones (see Summerton and Weller, U.S. Pat. No. 5,034,506); or peptide nucleic acid (PNA) backbones (wherein the phosphodiester backbone of the oligonucleotide is replaced with a polyamide backbone, the nucleotides being bound directly or indirectly to the aza nitrogen atoms of the polyamide backbone, see Nielsen et al., Science 1991, 254, 1497).

[0629] q. Stereospecific Oligonucleotides

[0630] In some embodiments, internucleotidic phosphorus atoms of oligonucleotides are chiral, and the properties of the oligonucleotides are adjusted based on the configuration of the chiral phosphorus atoms. In some embodiments, appropriate methods may be used to synthesize P-chiral oligonucleotide analogs in a stereocontrolled manner (e.g., as described in Oka N, Wada T, Stereocontrolled synthesis of oligonucleotide analogs containing chiral internucleotidic phosphorus atoms. Chem Soc Rev. 2011 December; 40(12):5829-43.) In some embodiments, phosphorothioate containing oligonucleotides are provided that comprise nucleoside units that are joined together by either substantially all Sp or substantially all Rp phosphorothioate intersugar linkages. In some embodiments, such phosphorothioate oligonucleotides having substantially chirally pure intersugar linkages are prepared by enzymatic or chemical synthesis, as described, for example, in U.S. Pat. No. 5,587,261, issued on Dec. 12, 1996, the contents of which are incorporated herein by reference in their entirety. In some embodiments, chirally controlled oligonucleotides provide selective cleavage patterns of a target nucleic acid. For example, in some embodiments, a chirally controlled oligonucleotide provides single site cleavage within a complementary sequence of a nucleic acid, as described, for example, in US Patent Application Publication 20170037399 A1, published on Feb. 2, 2017, entitled “CHIRAL DESIGN”, the contents of which are incorporated herein by reference in their entirety.

[0631] r. Morpholinos

[0632] In some embodiments, the oligonucleotide may be a morpholino-based compounds. Morpholino-based oligomeric compounds are described in Dwaine A. Braasch and David R. Corey, Biochemistry, 2002, 41(14), 4503-4510); Genesis, volume 30, issue 3, 2001; Heasman, J., Dev. Biol., 2002, 243, 209-214; Nasevicius et al., Nat. Genet., 2000, 26, 216-220; Lacerra et al., Proc. Natl. Acad. Sci., 2000, 97, 9591-9596; and U.S. Pat. No. 5,034,506, issued Jul. 23, 1991. In some embodiments, the morpholino-based oligomeric compound is a phosphorodiamidate morpholino oligomer (PMO) (e.g., as described in Iverson, Curr. Opin. Mol. Ther., 3:235-238, 2001; and Wang et al., J. Gene Med., 12:354-364, 2010; the disclosures of which are incorporated herein by reference in their entireties).

[0633] s. Peptide Nucleic Acids (PNAs)

[0634] In some embodiments, both a sugar and an internucleoside linkage (the backbone) of the nucleotide units of an oligonucleotide are replaced with novel groups. In some embodiments, the base units are maintained for hybridization with an appropriate nucleic acid target compound. One such oligomeric compound, an oligonucleotide mimetic that has been shown to have excellent hybridization properties, is referred to as a peptide nucleic acid (PNA). In PNA compounds, the sugar-backbone of an oligonucleotide is replaced with an amide containing backbone, for example, an aminoethylglycine backbone. The nucleobases are retained and are bound directly or indirectly to aza nitrogen atoms of the amide portion of the backbone. Representative publications that report the preparation of PNA compounds include, but are not limited to, U.S. Pat. Nos. 5,539,082; 5,714,331; and 5,719,262, each of which is herein incorporated by reference. Further teaching of PNA compounds can be found in Nielsen et al., Science, 1991, 254, 1497-1500.

[0635] t. Gapmers

[0636] In some embodiments, an oligonucleotide described herein is a gapmer. A gapmer oligonucleotide generally has the formula 5′-X-Y-Z-3′, with X and Z as flanking regions around a gap region Y. In some embodiments, flanking region X of formula 5′-X-Y-Z-3′ is also referred to as X region, flanking sequence X, 5′ wing region X, or 5′ wing segment. In some embodiments, flanking region Z of formula 5′-X-Y-Z-3′ is also referred to as Z region, flanking sequence Z, 3′ wing region Z, or 3′ wing segment. In some embodiments, gap region Y of formula 5′-X-Y-Z-3′ is also referred to as Y region, Y segment, or gap-segment Y. In some embodiments, each nucleoside in the gap region Y is a 2′-deoxyribonucleoside, and neither the 5′ wing region X or the 3′ wing region Z contains any 2′-deoxyribonucleosides.

[0637] In some embodiments, the Y region is a contiguous stretch of nucleotides, e.g., a region of 6 or more DNA nucleotides, which are capable of recruiting an RNAse, such as RNAse H. In some embodiments, the gapmer binds to the target nucleic acid, at which point an RNAse is recruited and can then cleave the target nucleic acid. In some embodiments, the Y region is flanked both 5′ and 3′ by regions X and Z comprising high-affinity modified nucleosides, e.g., one to six high-affinity modified nucleosides. Examples of high affinity modified nucleosides include, but are not limited to, 2′-modified nucleosides (e.g., 2′-MOE, 2′O-Me, 2′-F) or 2′-4′ bicyclic nucleosides (e.g., LNA, cEt, ENA). In some embodiments, the flanking sequences X and Z may be of 1-20 nucleotides, 1-8 nucleotides, or 1-5 nucleotides in length. The flanking sequences X and Z may be of similar length or of dissimilar lengths. In some embodiments, the gap-segment Y may be a nucleotide sequence of 5-20 nucleotides, 5-15 twelve nucleotides, or 6-10 nucleotides in length.

[0638] In some embodiments, the gap region of the gapmer oligonucleotides may contain modified nucleotides or nucleosides known to be acceptable for efficient RNase H action in addition to DNA nucleosides, such as C4′-substituted nucleosides, acyclic nucleosides, and arabino-configured nucleosides. In some embodiments, the gap region comprises one or more unmodified internucleoside linkages. In some embodiments, one or both flanking regions each independently comprise one or more phosphorothioate internucleoside linkages (e.g., phosphorothioate internucleoside linkages or other linkages) between at least two, at least three, at least four, at least five or more nucleotides. In some embodiments, the gap region and two flanking regions each independently comprise modified internucleoside linkages (e.g., phosphorothioate internucleoside linkages or other linkages) between at least two, at least three, at least four, at least five or more nucleotides.

[0639] A gapmer may be produced using appropriate methods. Representative U.S. patents, U.S. patent publications, and PCT publications that teach the preparation of gapmers include, but are not limited to, U.S. Pat. Nos. 5,013,830; 5,149,797; 5,220,007; 5,256,775; 5,366,878; 5,403,711; 5,491,133; 5,565,350; 5,623,065; 5,652,355; 5,652,356; 5,700,922; 5,898,031; 7,015,315; 7,101,993; 7,399,845; 7,432,250; 7,569,686; 7,683,036; 7,750,131; 8,580,756; 9,045,754; 9,428,534; 9,695,418; 10,017,764; 10,260,069; 9,428,534; 8,580,756; U.S. patent publication Nos. US20050074801, US20090221685; US20090286969, US20100197762, and US20110112170; PCT publication Nos. WO2004069991; WO2005023825; WO2008049085 and WO2009090182; and EP Patent No. EP2,149,605, each of which is herein incorporated by reference in its entirety.

[0640] In some embodiments, a gapmer is 10⁻⁴⁰ nucleosides in length. For example, a gapmer may be 10-40, 10-35, 10-30, 10-25, 10-20, 10-15, 15-40, 15-35, 15-30, 15-25, 15-20, 20-40, 20-35, 20-30, 20-25, 25-40, 25-35, 25-30, 30-40, 30-35, or 35-40 nucleosides in length. In some embodiments, a gapmer is 10, 11, 12, 13, 14, 15, 16, 17, 18, 19, 20, 21, 22, 23, 24, 25, 26, 27, 28, 29, 30, 31, 32, 33, 34, 35, 36, 37, 38, 39, or 40 nucleosides in length.

[0641] In some embodiments, the gap region Y in a gapmer is 5-20 nucleosides in length. For example, the gap region Y may be 5-20, 5-15, 5-10, 10-20, 10-15, or 15-20 nucleosides in length. In some embodiments, the gap region Y is 5, 6, 7, 8, 9, 10, 11, 12, 13, 14, 15, 16, 17, 18, 19, or 20 nucleosides in length. In some embodiments, each nucleoside in the gap region Y is a 2′-deoxyribonucleoside. In some embodiments, all nucleosides in the gap region Y are 2′-deoxyribonucleosides. In some embodiments, one or more of the nucleosides in the gap region Y is a modified nucleoside (e.g., a 2′ modified nucleoside such as those described herein). In some embodiments, one or more cytosines in the gap region Y are optionally 5-methyl-cytosines. In some embodiments, each cytosine in the gap region Y is a 5-methyl-cytosines.

[0642] In some embodiments, the 5′wing region of a gapmer (X in the 5′-X-Y-Z-3′ formula) and the 3′wing region of a gapmer (Z in the 5′-X-Y-Z-3′ formula) are independently 1-20 nucleosides long. For example, the 5′wing region of a gapmer (X in the 5′-X-Y-Z-3′ formula) and the 3′wing region of the gapmer (Z in the 5′-X-Y-Z-3′ formula) may be independently 1-20, 1-15, 1-10, 1-7, 1-5, 1-3, 1-2, 2-5, 2-7, 3-5, 3-7, 5-20, 5-15, 5-10, 10-20, 10-15, or 15-20 nucleosides long. In some embodiments, the 5′wing region of the gapmer (X in the 5′-X-Y-Z-3′ formula) and the 3′wing region of the gapmer (Z in the 5′-X-Y-Z-3′ formula) are independently 1, 2, 3, 4, 5, 6, 7, 8, 9, 10, 11, 12, 13, 14, 15, 16, 17, 18, 19, or 20 nucleosides long. In some embodiments, the 5′wing region of the gapmer (X in the 5′-X-Y-Z-3′ formula) and the 3′wing region of the gapmer (Z in the 5′-X-Y-Z-3′ formula) are of the same length. In some embodiments, the 5′wing region of the gapmer (X in the 5′-X-Y-Z-3′ formula) and the 3′wing region of the gapmer (Z in the 5′-X-Y-Z-3′ formula) are of different lengths. In some embodiments, the 5′wing region of the gapmer (X in the 5′-X-Y-Z-3′ formula) is longer than the 3′wing region of the gapmer (Z in the 5′-X-Y-Z-3′ formula). In some embodiments, the 5′wing region of the gapmer (X in the 5′-X-Y-Z-3′ formula) is shorter than the 3′wing region of the gapmer (Z in the 5′-X-Y-Z-3′ formula).

[0643] In some embodiments, a gapmer comprises a 5′-X-Y-Z-3′ of 5-10-5, 4-12-4, 3-14-3, 2-16-2, 1-18-1, 3-10-3, 2-10-2, 1-10-1, 2-8-2, 4-6-4, 3-6-3, 2-6-2, 4-7-4, 3-7-3, 2-7-2, 4-8-4, 3-8-3, 2-8-2, 1-8-1, 2-9-2, 1-9-1, 2-10-2, 1-10-1, 1-12-1, 1-16-1, 2-15-1, 1-15-2, 1-14-3, 3-14-1, 2-14-2, 1-13-4, 4-13-1, 2-13-3, 3-13-2, 1-12-5, 5-12-1, 2-12-4, 4-12-2, 3-12-3, 1-11-6, 6- 11-1, 2-11-5, 5-11-2, 3-11-4, 4-11-3, 1-17-1, 2-16-1, 1-16-2, 1-15-3, 3-15-1, 2-15-2, 1-14-4, 4-14-1, 2-14-3, 3-14-2, 1-13-5, 5-13-1, 2-13-4, 4-13-2, 3-13-3, 1-12-6, 6-12-1, 2-12-5, 5-12-2, 3-12-4, 4-12-3, 1-11-7, 7-11-1, 2-11-6, 6-11-2, 3-11-5, 5-11-3, 4-11-4, 1-18-1, 1-17-2, 2-17-1, 1-16-3, 1-16-3, 2-16-2, 1-15-4, 4-15-1, 2-15-3, 3-15-2, 1-14-5, 5-14-1, 2-14-4, 4-14-2, 3-14-3, 1-13-6, 6-13-1, 2-13-5, 5-13-2, 3-13-4, 4-13-3, 1-12-7, 7-12-1, 2-12-6, 6-12-2, 3-12-5, 5-12-3, 1-11-8, 8-11-1, 2-11-7, 7-11-2, 3-11-6, 6-11-3, 4-11-5, 5-11-4, 1-18-1, 1-17-2, 2-17-1, 1-16-3, 3-16-1, 2-16-2, 1-15-4, 4-15-1, 2-15-3, 3-15-2, 1-14-5, 2-14-4, 4-14-2, 3-14-3, 1-13-6, 6-13-1, 2-13-5, 5-13-2, 3-13-4, 4-13-3, 1-12-7, 7-12-1, 2-12-6, 6-12-2, 3-12-5, 5-12-3, 1-11-8, 8-11-1, 2-11-7, 7-11-2, 3-11-6, 6-11-3, 4-11-5, 5-11-4, 1-19-1, 1-18-2, 2-18-1, 1-17-3, 3-17-1, 2-17-2, 1-16-4, 4-16-1, 2-16-3, 3-16-2, 1-15-5, 2-15-4, 4-15-2, 3-15-3, 1-14-6, 6-14-1, 2-14-5, 5-14-2, 3-14-4, 4-14-3, 1-13-7, 7-13-1, 2-13-6, 6-13-2, 3-13-5, 5-13-3, 4-13-4, 1-12-8, 8-12-1, 2-12-7, 7-12-2, 3-12-6, 6-12-3, 4-12-5, 5-12-4, 2-11-8, 8-11-2, 3-11-7, 7-11-3, 4-11-6, 6-11-4, 5-11-5, 1-20-1, 1-19-2, 2-19-1, 1-18-3, 3-18-1, 2-18-2, 1-17-4, 4-17-1, 2-17-3, 3-17-2, 1-16-5, 2-16-4, 4-16-2, 3-16-3, 1-15-6, 6-15-1, 2-15-5, 5-15-2, 3-15-4, 4-15-3, 1-14-7, 7-14-1, 2-14-6, 6-14-2, 3-14-5, 5-14-3, 4-14-4, 1-13-8, 8-13-1, 2-13-7, 7-13-2, 3-13-6, 6-13-3, 4-13-5, 5-13-4, 2-12-8, 8-12-2, 3-12-7, 7-12-3, 4-12-6, 6-12-4, 5-12-5, 3-11-8, 8-11-3, 4-11-7, 7-11-4, 5-11-6, 6-11-5, 1-21-1, 1-20-2, 2-20-1, 1-20-3, 3-19-1, 2-19-2, 1-18-4, 4-18-1, 2-18-3, 3-18-2, 1-17-5, 2-17-4, 4-17-2, 3-17-3, 1-16-6, 6-16-1, 2-16-5, 5-16-2, 3-16-4, 4-16-3, 1-15-7, 7-15-1, 2-15-6, 6-15-2, 3-15-5, 5-15-3, 4-15-4, 1-14-8, 8-14-1, 2-14-7, 7-14-2, 3-14-6, 6-14-3, 4-14-5, 5-14-4, 2-13-8, 8-13-2, 3-13-7, 7-13-3, 4-13-6, 6-13-4, 5-13-5, 1-12-10, 10-12-1, 2-12-9, 9-12-2, 3-12-8, 8-12-3, 4-12-7, 7-12-4, 5-12-6, 6-12-5, 4-11-8, 8-11-4, 5-11-7, 7-11-5, 6-11-6, 1-22-1, 1-21-2, 2-21-1, 1-21-3, 3-20-1, 2-20-2, 1-19-4, 4-19-1, 2-19-3, 3-19-2, 1-18-5, 2-18-4, 4-18-2, 3-18-3, 1-17-6, 6-17-1, 2-17-5, 5-17-2, 3-17-4, 4-17-3, 1-16-7, 7-16-1, 2-16-6, 6-16-2, 3-16-5, 5-16-3, 4-16-4, 1-15-8, 8-15-1, 2-15-7, 7-15-2, 3-15-6, 6-15-3, 4-15-5, 5-15-4, 2-14-8, 8-14-2, 3-14-7, 7-14-3, 4-14-6, 6-14-4, 5-14-5, 3-13-8, 8-13-3, 4-13-7, 7-13-4, 5-13-6, 6-13-5, 4-12-8, 8-12-4, 5-12-7, 7-12-5, 6-12-6, 5-11-8, 8-11-5, 6-11-7, or 7-11-6. The numbers indicate the number of nucleosides in X, Y, and Z regions in the 5′-X-Y-Z-3′ gapmer.

[0644] In some embodiments, one or more nucleosides in the 5′wing region of a gapmer (X in the 5′-X-Y-Z-3′ formula) or the 3′wing region of a gapmer (Z in the 5′-X-Y-Z-3′ formula) are modified nucleosides (e.g., high-affinity modified nucleosides). In some embodiments, the modified nucleoside (e.g., high-affinity modified nucleosides) is a 2′-modifeid nucleoside. In some embodiments, the 2′-modified nucleoside is a 2′-4′ bicyclic nucleoside or a non-bicyclic 2′-modified nucleoside. In some embodiments, the high-affinity modified nucleoside is a 2′-4′ bicyclic nucleoside (e.g., LNA, cEt, or ENA) or a non-bicyclic 2′-modified nucleoside (e.g., 2′-fluoro (2′-F), 2′-O-methyl (2′-O-Me), 2′-O-methoxyethyl (2′-MOE), 2′-O-aminopropyl (2′-O-AP), 2′-O-dimethylaminoethyl (2′-O-DMAOE), 2′-O-dimethylaminopropyl (2′-O-DMAP), 2′-O-dimethylaminoethyloxyethyl (2′-O-DMAEOE), or 2′-O—N-methylacetamido (2′-O-NMA)).

[0645] In some embodiments, one or more nucleosides in the 5′wing region of a gapmer (X in the 5′-X-Y-Z-3′ formula) are high-affinity modified nucleosides. In some embodiments, each nucleoside in the 5′wing region of the gapmer (X in the 5′-X-Y-Z-3′ formula) is a high-affinity modified nucleoside. In some embodiments, one or more nucleosides in the 3′wing region of a gapmer (Z in the 5′-X-Y-Z-3′ formula) are high-affinity modified nucleosides. In some embodiments, each nucleoside in the 3′wing region of the gapmer (Z in the 5′-X-Y-Z-3′ formula) is a high-affinity modified nucleoside. In some embodiments, one or more nucleosides in the 5′wing region of the gapmer (X in the 5′-X-Y-Z-3′ formula) are high-affinity modified nucleosides and one or more nucleosides in the 3′wing region of the gapmer (Z in the 5′-X-Y-Z-3′ formula) are high-affinity modified nucleosides. In some embodiments, each nucleoside in the 5′wing region of the gapmer (X in the 5′-X-Y-Z-3′ formula) is a high-affinity modified nucleoside and each nucleoside in the 3′wing region of the gapmer (Z in the 5′-X-Y-Z-3′ formula) is high-affinity modified nucleoside.

[0646] In some embodiments, the 5′wing region of a gapmer (X in the 5′-X-Y-Z-3′ formula) comprises the same high affinity nucleosides as the 3′wing region of the gapmer (Z in the 5′-X-Y-Z-3′ formula). For example, the 5′wing region of the gapmer (X in the 5′-X-Y-Z-3′ formula) and the 3′wing region of the gapmer (Z in the 5′-X-Y-Z-3′ formula) may comprise one or more non-bicyclic 2′-modified nucleosides (e.g., 2′-MOE or 2′-O-Me). In another example, the 5′wing region of the gapmer (X in the 5′-X-Y-Z-3′ formula) and the 3′wing region of the gapmer (Z in the 5′-X-Y-Z-3′ formula) may comprise one or more 2′-4′ bicyclic nucleosides (e.g., LNA or cEt). In some embodiments, each nucleoside in the 5′wing region of the gapmer (X in the 5′-X-Y-Z-3′ formula) and the 3′wing region of the gapmer (Z in the 5′-X-Y-Z-3′ formula) is a non-bicyclic 2′-modified nucleosides (e.g., 2′-MOE or 2′-O-Me). In some embodiments, each nucleoside in the 5′wing region of the gapmer (X in the 5′-X-Y-Z-3′ formula) and the 3′wing region of the gapmer (Z in the 5′-X-Y-Z-3′ formula) is a 2′-4′ bicyclic nucleosides (e.g., LNA or cEt).

[0647] In some embodiments, a gapmer comprises a 5′-X-Y-Z-3′ configuration, wherein X and Z is independently 1-7 (e.g., 1, 2, 3, 4, 5, 6, or 7) nucleosides in length and Y is 6-10 (e.g., 6, 7, 8, 9, or 10) nucleosides in length, wherein each nucleoside in X and Z is a non-bicyclic 2′-modified nucleosides (e.g., 2′-MOE or 2′-O-Me) and each nucleoside in Y is a 2′-deoxyribonucleoside. In some embodiments, the gapmer comprises a 5′-X-Y-Z-3′ configuration, wherein X and Z is independently 1-7 (e.g., 1, 2, 3, 4, 5, 6, or 7) nucleosides in length and Y is 6-10 (e.g., 6, 7, 8, 9, or 10) nucleosides in length, wherein each nucleoside in X and Z is a 2′-4′ bicyclic nucleosides (e.g., LNA or cEt) and each nucleoside in Y is a 2′-deoxyribonucleoside. In some embodiments, the 5′wing region of the gapmer (X in the 5′-X-Y-Z-3′ formula) comprises different high affinity nucleosides as the 3′wing region of the gapmer (Z in the 5′-X-Y-Z-3′ formula). For example, the 5′wing region of the gapmer (X in the 5′-X-Y-Z-3′ formula) may comprise one or more non-bicyclic 2′-modified nucleosides (e.g., 2′-MOE or 2′-O-Me) and the 3′wing region of the gapmer (Z in the 5′-X-Y-Z-3′ formula) may comprise one or more 2′-4′ bicyclic nucleosides (e.g., LNA or cEt). In another example, the 3′wing region of the gapmer (Z in the 5′-X-Y-Z-3′ formula) may comprise one or more non-bicyclic 2′-modified nucleosides (e.g., 2′-MOE or 2′-O-Me) and the 5′wing region of the gapmer (X in the 5′-X-Y-Z-3′ formula) may comprise one or more 2′-4′ bicyclic nucleosides (e.g., LNA or cEt).

[0648] In some embodiments, a gapmer comprises a 5′-X-Y-Z-3′ configuration, wherein X and Z is independently 1-7 (e.g., 1, 2, 3, 4, 5, 6, or 7) nucleosides in length and Y is 6-10 (e.g., 6, 7, 8, 9, or 10) nucleosides in length, wherein each nucleoside in X is a non-bicyclic 2′-modified nucleosides (e.g., 2′-MOE or 2′-O-Me), each nucleoside in Z is a 2′-4′ bicyclic nucleosides (e.g., LNA or cEt), and each nucleoside in Y is a 2′-deoxyribonucleoside. In some embodiments, the gapmer comprises a 5′-X-Y-Z-3′ configuration, wherein X and Z is independently 1-7 (e.g., 1, 2, 3, 4, 5, 6, or 7) nucleosides in length and Y is 6-10 (e.g., 6, 7, 8, 9, or 10) nucleosides in length, wherein each nucleoside in X is a 2′-4′ bicyclic nucleosides (e.g., LNA or cEt), each nucleoside in Z is a non-bicyclic 2′-modified nucleosides (e.g., 2′-MOE or 2′-O-Me) and each nucleoside in Y is a 2′-deoxyribonucleoside.

[0649] In some embodiments, the 5′wing region of a gapmer (X in the 5′-X-Y-Z-3′ formula) comprises one or more non-bicyclic 2′-modified nucleosides (e.g., 2′-MOE or 2′-O-Me) and one or more 2′-4′ bicyclic nucleosides (e.g., LNA or cEt). In some embodiments, the 3′wing region of the gapmer (Z in the 5′-X-Y-Z-3′ formula) comprises one or more non-bicyclic 2′-modified nucleosides (e.g., 2′-MOE or 2′-O-Me) and one or more 2′-4′ bicyclic nucleosides (e.g., LNA or cEt). In some embodiments, both the 5′wing region of the gapmer (X in the 5′-X-Y-Z-3′ formula) and the 3′wing region of the gapmer (Z in the 5′-X-Y-Z-3′ formula) comprise one or more non-bicyclic 2′-modified nucleosides (e.g., 2′-MOE or 2′-O-Me) and one or more 2′-4′ bicyclic nucleosides (e.g., LNA or cEt).

[0650] In some embodiments, a gapmer comprises a 5′-X-Y-Z-3′ configuration, wherein X and Z is independently 2-7 (e.g., 2, 3, 4, 5, 6, or 7) nucleosides in length and Y is 6-10 (e.g., 6, 7, 8, 9, or 10) nucleosides in length, wherein at least one but not all (e.g., 1, 2, 3, 4, 5, or 6) of positions 1, 2, 3, 4, 5, 6, or 7 in X (the 5′ most position is position 1) is a non-bicyclic 2′-modified nucleoside (e.g., 2′-MOE or 2′-O-Me), wherein the rest of the nucleosides in both X and Z are 2′-4′ bicyclic nucleosides (e.g., LNA or cEt), and wherein each nucleoside in Y is a 2′deoxyribonucleoside. In some embodiments, the gapmer comprises a 5′-X-Y-Z-3′ configuration, wherein X and Z is independently 2-7 (e.g., 2, 3, 4, 5, 6, or 7) nucleosides in length and Y is 6-10 (e.g., 6, 7, 8, 9, or 10) nucleosides in length, wherein at least one but not all (e.g., 1, 2, 3, 4, 5, or 6) of positions 1, 2, 3, 4, 5, 6, or 7 in Z (the 5′ most position is position 1) is a non-bicyclic 2′-modified nucleoside (e.g., 2′-MOE or 2′-O-Me), wherein the rest of the nucleosides in both X and Z are 2′-4′ bicyclic nucleosides (e.g., LNA or cEt), and wherein each nucleoside in Y is a 2′deoxyribonucleoside. In some embodiments, the gapmer comprises a 5′-X-Y-Z-3′ configuration, wherein X and Z is independently 2-7 (e.g., 2, 3, 4, 5, 6, or 7) nucleosides in length and Y is 6-10 (e.g., 6, 7, 8, 9, or 10) nucleosides in length, wherein at least one but not all (e.g., 1, 2, 3, 4, 5, or 6) of positions 1, 2, 3, 4, 5, 6, or 7 in X and at least one of positions but not all (e.g., 1, 2, 3, 4, 5, or 6) 1, 2, 3, 4, 5, 6, or 7 in Z (the 5′ most position is position 1) is a non-bicyclic 2′-modified nucleoside (e.g., 2′-MOE or 2′-O-Me), wherein the rest of the nucleosides in both X and Z are 2′-4′ bicyclic nucleosides (e.g., LNA or cEt), and wherein each nucleoside in Y is a 2′deoxyribonucleoside.

[0651] Non-limiting examples of gapmers configurations with a mix of non-bicyclic 2′-modified nucleoside (e.g., 2′-MOE or 2′-O-Me) and 2′-4′ bicyclic nucleosides (e.g., LNA or cEt) in the 5′wing region of the gapmer (X in the 5′-X-Y-Z-3′ formula) and/or the 3′wing region of the gapmer (Z in the 5′-X-Y-Z-3′ formula) include: BBB-(D)n-BBBAA; KKK-(D)n-KKKAA; LLL-(D)n-LLLAA; BBB-(D)n-BBBEE; KKK-(D)n-KKKEE; LLL-(D)n-LLLEE; BBB-(D)n-BBBAA; KKK-(D)n-KKKAA; LLL-(D)n-LLLAA; BBB-(D)n-BBBEE; KKK-(D)n-KKKEE; LLL-(D)n-LLLEE; BBB-(D)n-BBBAAA; KKK-(D)n-KKKAAA; LLL-(D)n-LLLAAA; BBB-(D)n-BBBEEE; KKK-(D)n-KKKEEE; LLL-(D)n-LLLEEE; BBB-(D)n-BBBAAA; KKK-(D)n-KKKAAA; LLL-(D)n-LLLAAA; BBB-(D)n-BBBEEE; KKK-(D)n-KKKEEE; LLL-(D)n-LLLEEE; BABA-(D)n-ABAB; KAKA-(D)n-AKAK; LALA-(D)n-ALAL; BEBE-(D)n-EBEB; KEKE-(D)n-EKEK; LELE-(D)n-ELEL; BABA-(D)n-ABAB; KAKA-(D)n-AKAK; LALA-(D)n-ALAL; BEBE-(D)n-EBEB; KEKE-(D)n-EKEK; LELE-(D)n-ELEL; ABAB-(D)n-ABAB; AKAK-(D)n-AKAK; ALAL-(D)n-ALAL; EBEB-(D)n-EBEB; EKEK-(D)n-EKEK; ELEL-(D)n-ELEL; ABAB-(D)n-ABAB; AKAK-(D)n-AKAK; ALAL-(D)n-ALAL; EBEB-(D)n-EBEB; EKEK-(D)n-EKEK; ELEL-(D)n-ELEL; AABB-(D)n-BBAA; BBAA-(D)n-AABB; AAKK-(D)n-KKAA; AALL-(D)n-LLAA; EEBB-(D)n-BBEE; EEKK-(D)n-KKEE; EELL-(D)n-LLEE; AABB-(D)n-BBAA; AAKK-(D)n-KKAA; AALL-(D)n-LLAA; EEBB-(D)n-BBEE; EEKK-(D)n-KKEE; EELL-(D)n-LLEE; BBB-(D)n-BBA; KKK-(D)n-KKA; LLL-(D)n-LLA; BBB-(D)n-BBE; KKK-(D)n-KKE; LLL-(D)n-LLE; BBB-(D)n-BBA; KKK-(D)n-KKA; LLL-(D)n-LLA; BBB-(D)n-BBE; KKK-(D)n-KKE; LLL-(D)n-LLE; BBB-(D)n-BBA; KKK-(D)n-KKA; LLL-(D)n-LLA; BBB-(D)n-BBE; KKK-(D)n-KKE; LLL-(D)n-LLE; ABBB-(D)n-BBBA; AKKK-(D)n-KKKA; ALLL-(D)n-LLLA; EBBB-(D)n-BBBE; EKKK-(D)n-KKKE; ELLL-(D)n-LLLE; ABBB-(D)n-BBBA; AKKK-(D)n-KKKA; ALLL-(D)n-LLLA; EBBB-(D)n-BBBE; EKKK-(D)n-KKKE; ELLL-(D)n-LLLE; ABBB-(D)n-BBBAA; AKKK-(D)n-KKKAA; ALLL-(D)n-LLLAA; EBBB-(D)n-BBBEE; EKKK-(D)n-KKKEE; ELLL-(D)n-LLLEE; ABBB-(D)n-BBBAA; AKKK-(D)n-KKKAA; ALLL-(D)n-LLLAA; EBBB-(D)n-BBBEE; EKKK-(D)n-KKKEE; ELLL-(D)n-LLLEE; AABBB-(D)n-BBB; AAKKK-(D)n-KKK; AALLL-(D)n-LLL; EEBBB-(D)n-BBB; EEKKK-(D)n-KKK; EELLL-(D)n-LLL; AABBB-(D)n-BBB; AAKKK-(D)n-KKK; AALLL-(D)n-LLL; EEBBB-(D)n-BBB; EEKKK-(D)n-KKK; EELLL-(D)n-LLL; AABBB-(D)n-BBBA; AAKKK-(D)n-KKKA; AALLL-(D)n-LLLA; EEBBB-(D)n-BBBE; EEKKK-(D)n-KKKE; EELLL-(D)n-LLLE; AABBB-(D)n-BBBA; AAKKK-(D)n-KKKA; AALLL-(D)n-LLLA; EEBBB-(D)n-BBBE; EEKKK-(D)n-KKKE; EELLL-(D)n-LLLE; ABBAABB-(D)n-BB; AKKAAKK-(D)n-KK; ALLAALLL-(D)n-LL; EBBEEBB-(D)n-BB; EKKEEKK-(D)n-KK; ELLEELL-(D)n-LL; ABBAABB-(D)n-BB; AKKAAKK-(D)n-KK; ALLAALL-(D)n-LL; EBBEEBB-(D)n-BB; EKKEEKK-(D)n-KK; ELLEELL-(D)n-LL; ABBABB-(D)n-BBB; AKKAKK-(D)n-KKK; ALLALLL-(D)n-LLL; EBBEBB-(D)n-BBB; EKKEKK-(D)n-KKK; ELLELL-(D)n-LLL; ABBABB-(D)n-BBB; AKKAKK-(D)n-KKK; ALLALL-(D)n-LLL; EBBEBB-(D)n-BBB; EKKEKK-(D)n-KKK; ELLELL-(D)n-LLL; EEEK-(D)n-EEEEEEEE; EEK-(D)n-EEEEEEEEE; EK-(D)n-EEEEEEEEEE; EK-(D)n-EEEKK; K-(D)n-EEEKEKE; K-(D)n-EEEKEKEE; K-(D)n-EEKEK; EK-(D)n-EEEEKEKE; EK-(D)n-EEEKEK; EEK-(D)n-KEEKE; EK-(D)n-EEKEK; EK-(D)n-KEEK; EEK-(D)n-EEEKEK; EK-(D)n-KEEEKEE; EK-(D)n-EEKEKE; EK-(D)n-EEEKEKE; and EK-(D)n-EEEEKEK. “A” nucleosides comprise a 2′-modified nucleoside; “B” represents a 2′-4′ bicyclic nucleoside; “K” represents a constrained ethyl nucleoside (cEt); “L” represents an LNA nucleoside; and “E” represents a 2′-MOE modified ribonucleoside; “D” represents a 2′-deoxyribonucleoside; “n” represents the length of the gap segment (Y in the 5′-X-Y-Z-3′ configuration) and is an integer between 1-20.

[0652] In some embodiments, any one of the gapmers described herein comprises one or more modified nucleoside linkages (e.g., a phosphorothioate linkage) in each of the X, Y, and Z regions. In some embodiments, each internucleoside linkage in the any one of the gapmers described herein is a phosphorothioate linkage. In some embodiments, each of the X, Y, and Z regions independently comprises a mix of phosphorothioate linkages and phosphodiester linkages. In some embodiments, each internucleoside linkage in the gap region Y is a phosphorothioate linkage, the 5′wing region X comprises a mix of phosphorothioate linkages and phosphodiester linkages, and the 3′wing region Z comprises a mix of phosphorothioate linkages and phosphodiester linkages.

[0653] u. Mixmers

[0654] In some embodiments, an oligonucleotide described herein may be a mixmer or comprise a mixmer sequence pattern. In general, mixmers are oligonucleotides that comprise both naturally and non-naturally occurring nucleosides or comprise two different types of non-naturally occurring nucleosides typically in an alternating pattern. Mixmers generally have higher binding affinity than unmodified oligonucleotides and may be used to specifically bind a target molecule, e.g., to block a binding site on the target molecule. Generally, mixmers do not recruit an RNase to the target molecule and thus do not promote cleavage of the target molecule. Such oligonucleotides that are incapable of recruiting RNase H have been described, for example, see WO2007/112754 or WO2007/112753.

[0655] In some embodiments, the mixmer comprises or consists of a repeating pattern of nucleoside analogues and naturally occurring nucleosides, or one type of nucleoside analogue and a second type of nucleoside analogue. However, a mixmer need not comprise a repeating pattern and may instead comprise any arrangement of modified nucleoside s and naturally occurring nucleoside s or any arrangement of one type of modified nucleoside and a second type of modified nucleoside. The repeating pattern, may, for instance be every second or every third nucleoside is a modified nucleoside, such as LNA, and the remaining nucleoside s are naturally occurring nucleosides, such as DNA, or are a 2′ substituted nucleoside analogue such as 2′-MOE or 2′ fluoro analogues, or any other modified nucleoside described herein. It is recognized that the repeating pattern of modified nucleoside, such as LNA units, may be combined with modified nucleoside at fixed positions e.g., at the 5′ or 3′ termini.

[0656] In some embodiments, a mixmer does not comprise a region of more than 5, more than 4, more than 3, or more than 2 consecutive naturally occurring nucleosides, such as DNA nucleosides. In some embodiments, the mixmer comprises at least a region consisting of at least two consecutive modified nucleoside, such as at least two consecutive LNAs. In some embodiments, the mixmer comprises at least a region consisting of at least three consecutive modified nucleoside units, such as at least three consecutive LNAs.

[0657] In some embodiments, the mixmer does not comprise a region of more than 7, more than 6, more than 5, more than 4, more than 3, or more than 2 consecutive nucleoside analogues, such as LNAs. In some embodiments, LNA units may be replaced with other nucleoside analogues, such as those referred to herein.

[0658] Mixmers may be designed to comprise a mixture of affinity enhancing modified nucleosides, such as in non-limiting example LNA nucleosides and 2′-O-Me nucleosides. In some embodiments, a mixmer comprises modified internucleoside linkages (e.g., phosphorothioate internucleoside linkages or other linkages) between at least two, at least three, at least four, at least five or more nucleosides.

[0659] A mixmer may be produced using any suitable method. Representative U.S. patents, U.S. patent publications, and PCT publications that teach the preparation of mixmers include U.S. patent publication Nos. US20060128646, US20090209748, US20090298916, US20110077288, and US20120322851, and U.S. Pat. No. 7,687,617.

[0660] In some embodiments, a mixmer comprises one or more morpholino nucleosides. For example, in some embodiments, a mixmer may comprise morpholino nucleosides mixed (e.g., in an alternating manner) with one or more other nucleosides (e.g., DNA, RNA nucleosides) or modified nucleosides (e.g., LNA, 2′-O-Me nucleosides).

[0661] In some embodiments, mixmers are useful for splice correcting or exon skipping, for example, as reported in Touznik A., et al., LNA/DNA mixmer-based antisense oligonucleotides correct alternative splicing of the SMN2 gene and restore SMN protein expression in type 1 SMA fibroblasts Scientific Reports, volume 7, Article number: 3672 (2017), Chen S. et al., Synthesis of a Morpholino Nucleic Acid (MNA)-Uridine Phosphoramidite, and Exon Skipping Using MNA/2′-O-Methyl Mixmer Antisense Oligonucleotide, Molecules 2016, 21, 1582, the contents of each which are incorporated herein by reference.

[0662] v. RNA Interference (RNAi)

[0663] In some embodiments, oligonucleotides provided herein may be in the form of small interfering RNAs (siRNA), also known as short interfering RNA or silencing RNA. SiRNA, is a class of double-stranded RNA molecules, typically about 20-25 base pairs in length that target nucleic acids (e.g., mRNAs) for degradation via the RNA interference (RNAi) pathway in cells. Specificity of siRNA molecules may be determined by the binding of the antisense strand of the molecule to its target RNA. Effective siRNA molecules are generally less than 30 to 35 base pairs in length to prevent the triggering of non-specific RNA interference pathways in the cell via the interferon response, although longer siRNA can also be effective. In some embodiments, the siRNA molecules are 7, 8, 9, 10, 11, 12, 13, 14, 15, 16, 17, 18, 19, 20, 21, 22, 23, 24, 25, 26, 27, 28, 29, 30, 35, 40, 45, 50, or more base pairs in length. In some embodiments, the siRNA molecules are 8 to 30 base pairs in length, 10 to 15 base pairs in length, 10 to 20 base pairs in length, 15 to 25 base pairs in length, 19 to 21 base pairs in length, 21 to 23 base pairs in length.

[0664] Following selection of an appropriate target RNA sequence, siRNA molecules that comprise a nucleotide sequence complementary to all or a portion of the target sequence, i.e., an antisense sequence, can be designed and prepared using appropriate methods (see, e.g., PCT Publication Number WO 2004/016735; and U.S. Patent Publication Nos. 2004/0077574 and 2008/0081791). The siRNA molecule can be double stranded (i.e., a dsRNA molecule comprising an antisense strand and a complementary sense strand that hybridizes to form the dsRNA) or single-stranded (i.e., a ssRNA molecule comprising just an antisense strand). The siRNA molecules can comprise a duplex, asymmetric duplex, hairpin or asymmetric hairpin secondary structure, having self-complementary sense and antisense strands.

[0665] In some embodiments, the antisense strand of the siRNA molecule is 7, 8, 9, 10, 11, 12, 13, 14, 15, 16, 17, 18, 19, 20, 21, 22, 23, 24, 25, 26, 27, 28, 29, 30, 35, 40, 45, 50, or more nucleotides in length. In some embodiments, the antisense strand is 8 to 50 nucleotides in length, 8 to 40 nucleotides in length, 8 to 30 nucleotides in length, 10 to 15 nucleotides in length, 10 to 20 nucleotides in length, 15 to 25 nucleotides in length, 19 to 21 nucleotides in length, 21 to 23 nucleotides in lengths.

[0666] In some embodiments, the sense strand of the siRNA molecule is 7, 8, 9, 10, 11, 12, 13, 14, 15, 16, 17, 18, 19, 20, 21, 22, 23, 24, 25, 26, 27, 28, 29, 30, 35, 40, 45, 50, or more nucleotides in length. In some embodiments, the sense strand is 8 to 50 nucleotides in length, 8 to 40 nucleotides in length, 8 to 30 nucleotides in length, 10 to 15 nucleotides in length, 10 to 20 nucleotides in length, 15 to 25 nucleotides in length, 19 to 21 nucleotides in length, 21 to 23 nucleotides in lengths.

[0667] In some embodiments, siRNA molecules comprise an antisense strand comprising a region of complementarity to a target region in a target mRNA. In some embodiments, the region of complementarity is at least 80%, at least 85%, at least 90%, at least 91%, at least 92%, at least 93%, at least 94%, at least 95%, at least 96%, at least 97%, at least 98%, at least 99% or 100% complementary to a target region in a target mRNA. In some embodiments, the target region is a region of consecutive nucleotides in the target mRNA. In some embodiments, a complementary nucleotide sequence need not be 100% complementary to that of its target to be specifically hybridizable or specific for a target RNA sequence.

[0668] In some embodiments, siRNA molecules comprise an antisense strand that comprises a region of complementarity to a target RNA sequence and the region of complementarity is in the range of 8 to 15, 8 to 30, 8 to 40, or 10 to 50, or 5 to 50, or 5 to 40 nucleotides in length. In some embodiments, a region of complementarity is 5, 6, 7, 8, 9, 10, 11, 12, 13, 14, 15, 16, 17, 18, 19, 20, 21, 22, 23, 24, 25, 26, 27, 28, 29, 30, 31, 32, 33, 34, 35, 36, 37, 38, 39, 40, 41, 42, 43, 44, 45, 46, 47, 48, 49, or 50 nucleotides in length. In some embodiments, the region of complementarity is complementary with at least 6, at least 7, at least 8, at least 9, at least 10, at least 11, at least 12, at least 13, at least 14, at least 15, at least 16, at least 17, at least 18, at least 19, at least 20, at least 21, at least 22, at least 23, at least 24, at least 25 or more consecutive nucleotides of a target RNA sequence. In some embodiments, siRNA molecules comprise a nucleotide sequence that contains no more than 1, 2, 3, 4, or 5 base mismatches compared to the portion of the consecutive nucleotides of target RNA sequence. In some embodiments, siRNA molecules comprise a nucleotide sequence that has up to 3 mismatches over 15 bases, or up to 2 mismatches over 10 bases.

[0669] In some embodiments, siRNA molecules comprise an antisense strand comprising a nucleotide sequence that is complementary (e.g., at least 85%, at least 90%, at least 95%, or 100%) to the target RNA sequence of the oligonucleotides provided herein (e.g., in Tables 8, 11, and 14). In some embodiments, siRNA molecules comprise an antisense strand comprising a nucleotide sequence that is complementary (e.g., at least 85%, at least 90%, at least 95%, or 100%) to the target RNA sequence of the oligonucleotides provided herein (e.g., in Tables 17, 20, 23, 26, 29, 32, 35, and 38). In some embodiments, siRNA molecules comprise an antisense strand comprising a nucleotide sequence that is at least 85%, at least 90%, at least 95%, or 100% identical to the oligonucleotides provided herein (e.g., in Tables 9, 10, 12, 13, 15, and 16). In some embodiments, siRNA molecules comprise an antisense strand comprising a nucleotide sequence that is at least 85%, at least 90%, at least 95%, or 100% identical to the oligonucleotides provided herein (e.g., in Tables 18, 19, 21, 22, 24, 25, 27, 28, 30, 31, 33, 34, 36, 37, 39, and 40). In some embodiments, siRNA molecules comprise an antisense strand comprising at least 6, at least 7, at least 8, at least 9, at least 10, at least 11, at least 12, at least 13, at least 14, at least 15, at least 16, at least 17, at least 18, at least 19, at least 20, at least 21, at least 22, at least 23, at least 24, at least 25 or more consecutive nucleotides of the oligonucleotides provided herein (e.g., in Tables 9, 10, 12, 13, 15, and 16). In some embodiments, siRNA molecules comprise an antisense strand comprising at least 6, at least 7, at least 8, at least 9, at least 10, at least 11, at least 12, at least 13, at least 14, at least 15, at least 16, at least 17, at least 18, at least 19, at least 20, at least 21, at least 22, at least 23, at least 24, at least 25 or more consecutive nucleotides of the oligonucleotides provided herein (e.g., in Tables 18, 19, 21, 22, 24, 25, 27, 28, 30, 31, 33, 34, 36, 37, 39, and 40). In some embodiments, siRNA molecules comprise an antisense strand comprising a nucleotide sequence that is complementary (e.g., at least 85%, at least 90%, at least 95%, or 100%) to the MLCK1 mRNA sequence as set forth in SEQ ID NO: 411.

[0670] Double-stranded siRNA may comprise sense and anti-sense RNA strands that are the same length or different lengths. Double-stranded siRNA molecules can also be assembled from a single oligonucleotide in a stem-loop structure, wherein self-complementary sense and antisense regions of the siRNA molecule are linked by means of a nucleic acid based or non-nucleic acid-based linker(s), as well as circular single-stranded RNA having two or more loop structures and a stem comprising self-complementary sense and antisense strands, wherein the circular RNA can be processed either in vivo or in vitro to generate an active siRNA molecule capable of mediating RNAi. Small hairpin RNA (shRNA) molecules thus are also contemplated herein. These molecules comprise a specific antisense sequence in addition to the reverse complement (sense) sequence, typically separated by a spacer or loop sequence. Cleavage of the spacer or loop provides a single-stranded RNA molecule and its reverse complement, such that they may anneal to form a dsRNA molecule (optionally with additional processing steps that may result in addition or removal of one, two, three or more nucleotides from the 3′ end and/or (e.g., and) the 5′ end of either or both strands). A spacer can be of a sufficient length to permit the antisense and sense sequences to anneal and form a double-stranded structure (or stem) prior to cleavage of the spacer (and, optionally, subsequent processing steps that may result in addition or removal of one, two, three, four, or more nucleotides from the 3′ end and/or (e.g., and) the 5′ end of either or both strands). A spacer sequence may be an unrelated nucleotide sequence that is situated between two complementary nucleotide sequence regions which, when annealed into a double-stranded nucleic acid, comprise a shRNA.

[0671] The overall length of the siRNA molecules can vary from about 14 to about 100 nucleotides depending on the type of siRNA molecule being designed. Generally between about 14 and about 50 of these nucleotides are complementary to the RNA target sequence, i.e. constitute the specific antisense sequence of the siRNA molecule. For example, when the siRNA is a double- or single-stranded siRNA, the length can vary from about 14 to about 50 nucleotides, whereas when the siRNA is a shRNA or circular molecule, the length can vary from about 40 nucleotides to about 100 nucleotides.

[0672] An siRNA molecule may comprise a 3′ overhang at one end of the molecule, The other end may be blunt-ended or have also an overhang (5′ or 3′). When the siRNA molecule comprises an overhang at both ends of the molecule, the length of the overhangs may be the same or different. In one embodiment, the siRNA molecule of the present disclosure comprises 3′ overhangs of about 1 to about 3 nucleotides on both ends of the molecule. In some embodiments, the siRNA molecule comprises 3′ overhangs of about 1 to about 3 nucleotides on the sense strand. In some embodiments, the siRNA molecule comprises 3′ overhangs of about 1 to about 3 nucleotides on the antisense strand. In some embodiments, the siRNA molecule comprises 3′ overhangs of about 1 to about 3 nucleotides on both the sense strand and the antisense strand.

[0673] In some embodiments, the siRNA molecule comprises one or more modified nucleotides or nucleosides (e.g., 1, 2, 3, 4, 5, 6, 7, 8, 9, 10 or more). In some embodiments, the siRNA molecule comprises one or more modified nucleotides/nucleosides and/or (e.g., and) one or more modified internucleotide linkages. In some embodiments, the modified nucleoside comprises a modified sugar moiety (e.g., a 2′ modified nucleoside). In some embodiments, the siRNA molecule comprises one or more 2′ modified nucleotides or nucleosides, e.g., a 2′-deoxy, 2′-fluoro (2′-F), 2′-O-methyl (2′-O-Me), 2′-O-methoxyethyl (2′-MOE), 2′-O-aminopropyl (2′-O-AP), 2′-O-dimethylaminoethyl (2′-O-DMAOE), 2′-O-dimethylaminopropyl (2′-O-DMAP), 2′-O-dimethylaminoethyloxyethyl (2′-O-DMAEOE), or 2′-O—N-methylacetamido (2′-O-NMA). In some embodiments, each nucleoside of the siRNA molecule is a modified nucleoside (e.g., a 2′-modified nucleoside). In some embodiments, the siRNA molecule comprises one or more phosphorodiamidate morpholinos. In some embodiments, each nucleotide of the siRNA molecule is a phosphorodiamidate morpholino.

[0674] In some embodiments, the siRNA molecule contains a phosphorothioate or other modified internucleoside linkage. In some embodiments, the siRNA molecule comprises phosphorothioate internucleoside linkages. In some embodiments, the siRNA molecule comprises phosphorothioate internucleoside linkages between at least two nucleosides. In some embodiments, the siRNA molecule comprises phosphorothioate internucleoside linkages between all nucleosides. For example, in some embodiments, the siRNA molecule comprises modified internucleoside linkages at the first, second, and/or (e.g., and) third internucleoside linkage at the 5′ or 3′ end of the siRNA molecule.

[0675] In some embodiments, the modified internucleoside linkages are phosphorus-containing linkages. In some embodiments, phosphorus-containing linkages that may be used include, but are not limited to, phosphorothioates, chiral phosphorothioates, phosphorodithioates, phosphotriesters, aminoalkylphosphotriesters, methyl and other alkyl phosphonates comprising 3′alkylene phosphonates and chiral phosphonates, phosphinates, phosphoramidates comprising 3′-amino phosphoramidate and aminoalkylphosphoramidates, thionophosphoramidates, thionoalkylphosphonates, thionoalkylphosphotriesters, and boranophosphates having normal 3′-5′ linkages, 2′-5′ linked analogs of these, and those having inverted polarity wherein the adjacent pairs of nucleoside units are linked 3′-5′ to 5′-3′ or 2′-5′ to 5′-2′; see U.S. Pat. Nos. 3,687,808; 4,469,863; 4,476,301; 5,023,243; 5,177,196; 5,188,897; 5,264,423; 5,276,019; 5,278,302; 5,286,717; 5,321,131; 5,399,676; 5,405,939; 5,453,496; 5,455,233; 5,466,677; 5,476,925; 5,519,126; 5,536,821; 5,541,306; 5,550,111; 5,563,253; 5,571,799; 5,587,361; and 5,625,050.

[0676] Any of the modified chemistries or formats of siRNA molecules described herein can be combined with each other. For example, one, two, three, four, five, or more different types of modifications can be included within the same siRNA molecule.

[0677] In some embodiments, the antisense strand comprises one or more modified nucleotides or nucleosides (e.g., 1, 2, 3, 4, 5, 6, 7, 8, 9, 10 or more). In some embodiments, the antisense strand comprises one or more modified nucleotides/nucleosides and/or (e.g., and) one or more modified internucleoside linkages. In some embodiments, the modified nucleotide/nucleoside comprises a modified sugar moiety (e.g., a 2′ modified nucleoside). In some embodiments, the antisense strand comprises one or more 2′ modified nucleosides, e.g., a 2′-deoxy, 2′-fluoro (2′-F), 2′-O-methyl (2′-O-Me), 2′-O-methoxyethyl (2′-MOE), 2′-O-aminopropyl (2′-O-AP), 2′-O-dimethylaminoethyl (2′-O-DMAOE), 2′-O-dimethylaminopropyl (2′-O-DMAP), 2′-O-dimethylaminoethyloxyethyl (2′-O-DMAEOE), or 2′-O—N-methylacetamido (2′-O-NMA). In some embodiments, each nucleotide/nucleoside of the antisense strand is a modified nucleotide/nucleoside (e.g., a 2′-modified nucleoside). In some embodiments, the antisense strand comprises one or more phosphorodiamidate morpholinos. In some embodiments, the antisense strand is a phosphorodiamidate morpholino oligomer (PMO).

[0678] In some embodiments, antisense strand contains a phosphorothioate or other modified internucleoside linkage. In some embodiments, the antisense strand comprises phosphorothioate internucleoside linkages. In some embodiments, the antisense strand comprises phosphorothioate internucleoside linkages between at least two nucleosides. In some embodiments, the antisense strand comprises phosphorothioate internucleoside linkages between all nucleosides. For example, in some embodiments, the antisense strand comprises modified internucleoside linkages at the first, second, and/or (e.g., and) third internucleoside linkage at the 5′ or 3′ end of the siRNA molecule. In some embodiments, the modified internucleoside linkages are phosphorus-containing linkages. In some embodiments, phosphorus-containing linkages that may be used include, but are not limited to, phosphorothioates, chiral phosphorothioates, phosphorodithioates, phosphotriesters, aminoalkylphosphotriesters, methyl and other alkyl phosphonates comprising 3′alkylene phosphonates and chiral phosphonates, phosphinates, phosphoramidates comprising 3′-amino phosphoramidate and aminoalkylphosphoramidates, thionophosphoramidates, thionoalkylphosphonates, thionoalkylphosphotriesters, and boranophosphates having normal 3′-5′ linkages, 2′-5′ linked analogs of these, and those having inverted polarity wherein the adjacent pairs of nucleoside units are linked 3′-5′ to 5′-3′ or 2′-5′ to 5′-2′; see U.S. Pat. Nos. 3,687,808; 4,469,863; 4,476,301; 5,023,243; 5,177,196; 5,188,897; 5,264,423; 5,276,019; 5,278,302; 5,286,717; 5,321,131; 5,399,676; 5,405,939; 5,453,496; 5,455, 233; 5,466,677; 5,476,925; 5,519,126; 5,536,821; 5,541,306; 5,550,111; 5,563, 253; 5,571,799; 5,587,361; and 5,625,050.

[0679] Any of the modified chemistries or formats of the antisense strand described herein can be combined with each other. For example, one, two, three, four, five, or more different types of modifications can be included within the same antisense strand.

[0680] In some embodiments, the sense strand comprises one or more modified nucleotides or nucleosides (e.g., 1, 2, 3, 4, 5, 6, 7, 8, 9, 10 or more). In some embodiments, the sense strand comprises one or more modified nucleotides/nucleosides and/or (e.g., and) one or more modified internucleoside linkages. In some embodiments, the modified nucleotide/nucleoside comprises a modified sugar moiety (e.g., a 2′ modified nucleoside). In some embodiments, the sense strand comprises one or more 2′ modified nucleotides/nucleosides, e.g., a 2′-deoxy, 2′-fluoro (2′-F), 2′-O-methyl (2′-O-Me), 2′-O-methoxyethyl (2′-MOE), 2′-O-aminopropyl (2′-O-AP), 2′-O-dimethylaminoethyl (2′-O-DMAOE), 2′-O-dimethylaminopropyl (2′-O-DMAP), 2′-O-dimethylaminoethyloxyethyl (2′-O-DMAEOE), or 2′-O—N-methylacetamido (2′-O-NMA). In some embodiments, each nucleotide or nucleotide of the sense strand is a modified nucleotide/nucleoside (e.g., a 2′-modified nucleoside). In some embodiments, the sense strand comprises one or more phosphorodiamidate morpholinos. In some embodiments, the antisense strand is a phosphorodiamidate morpholino oligomer (PMO). In some embodiments, the sense strand contains a phosphorothioate or other modified internucleoside linkage. In some embodiments, the sense strand comprises phosphorothioate internucleoside linkages. In some embodiments, the sense strand comprises phosphorothioate internucleoside linkages between at least two nucleosides. In some embodiments, the sense strand comprises phosphorothioate internucleoside linkages between all nucleosides. For example, in some embodiments, the sense strand comprises modified internucleoside linkages at the first, second, and/or (e.g., and) third internucleoside linkage at the 5′ or 3′ end of the sense strand.

[0681] In some embodiments, the modified internucleoside linkages are phosphorus-containing linkages. In some embodiments, phosphorus-containing linkages that may be used include, but are not limited to, phosphorothioates, chiral phosphorothioates, phosphorodithioates, phosphotriesters, aminoalkylphosphotriesters, methyl and other alkyl phosphonates comprising 3′alkylene phosphonates and chiral phosphonates, phosphinates, phosphoramidates comprising 3′-amino phosphoramidate and aminoalkylphosphoramidates, thionophosphoramidates, thionoalkylphosphonates, thionoalkylphosphotriesters, and boranophosphates having normal 3′-5′ linkages, 2′-5′ linked analogs of these, and those having inverted polarity wherein the adjacent pairs of nucleoside units are linked 3′-5′ to 5′-3′ or 2′-5′ to 5′-2′; see U.S. Pat. Nos. 3,687,808; 4,469,863; 4,476,301; 5,023,243; 5,177,196; 5,188,897; 5,264,423; 5,276,019; 5,278,302; 5,286,717; 5,321,131; 5,399,676; 5,405,939; 5,453,496; 5,455, 233; 5,466,677; 5,476,925; 5,519,126; 5,536,821; 5,541,306; 5,550,111; 5,563, 253; 5,571,799; 5,587,361; and 5,625,050.

[0682] Any of the modified chemistries or formats of the sense strand described herein can be combined with each other. For example, one, two, three, four, five, or more different types of modifications can be included within the same sense strand.

[0683] In some embodiments, the antisense or sense strand of the siRNA molecule comprises modifications that enhance or reduce RNA-induced silencing complex (RISC) loading. In some embodiments, the antisense strand of the siRNA molecule comprises modifications that enhance RISC loading. In some embodiments, the sense strand of the siRNA molecule comprises modifications that reduce RISC loading and reduce off-target effects. In some embodiments, the antisense strand of the siRNA molecule comprises a 2′-O-methoxyethyl (2′-MOE) modification. The addition of the 2′-O-methoxyethyl (2′-MOE) group at the cleavage site improves both the specificity and silencing activity of siRNAs by facilitating the oriented RNA-induced silencing complex (RISC) loading of the modified strand, as described in Song et al., (2017) Mol Ther Nucleic Acids 9:242-250, incorporated herein by reference in its entirety. In some embodiments, the antisense strand of the siRNA molecule comprises a 2′-OMe-phosphorodithioate modification, which increases RISC loading as described in Wu et al., (2014) Nat Commun 5:3459, incorporated herein by reference in its entirety.

[0684] In some embodiments, the sense strand of the siRNA molecule comprises a 5′-morpholino, which reduces RISC loading of the sense strand and improves antisense strand selection and RNAi activity, as described in Kumar et al., (2019) Chem Commun (Camb) 55(35):5139-5142, incorporated herein by reference in its entirety. In some embodiments, the sense strand of the siRNA molecule is modified with a synthetic RNA-like high affinity nucleoside analogue, Locked Nucleic Acid (LNA), which reduces RISC loading of the sense strand and further enhances antisense strand incorporation into RISC, as described in Elman et al., (2005) Nucleic Acids Res. 33(1): 439-447, incorporated herein by reference in its entirety. In some embodiments, the sense strand of the siRNA molecule comprises a 5′ unlocked nucleic acid (UNA) modification, which reduce RISC loading of the sense strand and improve silencing potency of the antisense strand, as described in Snead et al., (2013) Mol Ther Nucleic Acids 2(7):e103, incorporated herein by reference in its entirety. In some embodiments, the sense strand of the siRNA molecule comprises a 5-nitroindole modification, which decreased the RNAi potency of the sense strand and reduces off-target effects as described in Zhang et al., (2012) Chembiochem 13(13):1940-1945, incorporated herein by reference in its entirety. In some embodiments, the sense strand comprises a 2‘-O’methyl (2′-O-Me) modification, which reduces RISC loading and the off-target effects of the sense strand, as described in Zheng et al., FASEB (2013) 27(10): 4017-4026, incorporated herein by reference in its entirety. In some embodiments, the sense strand of the siRNA molecule is fully substituted with morpholino, 2′-MOE or 2′-O-Me residues, and are not recognized by RISC as described in Kole et al., (2012) Nature reviews. Drug Discovery 11(2):125-140, incorporated herein by reference in its entirety. In some embodiments the antisense strand of the siRNA molecule comprises a 2′-MOE modification and the sense strand comprises an 2′-O-Me modification (see e.g., Song et al., (2017) Mol Ther Nucleic Acids 9:242-250). In some embodiments at least one (e.g., at least 2, at least 3, at least 4, at least 5, at least 10) siRNA molecule is linked (e.g., covalently) to a muscle-targeting agent. In some embodiments, the muscle-targeting agent may comprise, or consist of, a nucleic acid (e.g., DNA or RNA), a peptide (e.g., an antibody), a lipid (e.g., a microvesicle), or a sugar moiety (e.g., a polysaccharide). In some embodiments, the muscle-targeting agent is an antibody. In some embodiments, the muscle-targeting agent is an anti-transferrin receptor 1 antibody (e.g., any one of the anti-TfR1 antibodies provided herein). In some embodiments, the muscle-targeting agent may be linked to the 5′ end of the sense strand of the siRNA molecule. In some embodiments, the muscle-targeting agent may be linked to the 3′ end of the sense strand of the siRNA molecule. In some embodiments, the muscle-targeting agent may be linked internally to the sense strand of the siRNA molecule. In some embodiments, the muscle-targeting agent may be linked to the 5′ end of the antisense strand of the siRNA molecule. In some embodiments, the muscle-targeting agent may be linked to the 3′ end of the antisense strand of the siRNA molecule. In some embodiments, the muscle-targeting agent may be linked internally to the antisense strand of the siRNA molecule.

[0685] w. microRNA (miRNAs)

[0686] In some embodiments, an oligonucleotide may be a microRNA (miRNA). MicroRNAs (referred to as “miRNAs”) are small non-coding RNAs, belonging to a class of regulatory molecules that control gene expression by binding to complementary sites on a target RNA transcript. Typically, miRNAs are generated from large RNA precursors (termed pri-miRNAs) that are processed in the nucleus into approximately 70 nucleotide pre-miRNAs, which fold into imperfect stem-loop structures. These pre-miRNAs typically undergo an additional processing step within the cytoplasm where mature miRNAs of 18-25 nucleotides in length are excised from one side of the pre-miRNA hairpin by an RNase III enzyme, Dicer.

[0687] As used herein, miRNAs including pri-miRNA, pre-miRNA, mature miRNA or fragments of variants thereof that retain the biological activity of mature miRNA. In one embodiment, the size range of the miRNA can be from 21 nucleotides to 170 nucleotides. In one embodiment the size range of the miRNA is from 70 to 170 nucleotides in length. In another embodiment, mature miRNAs of from 21 to 25 nucleotides in length can be used.

[0688] x. Aptamers

[0689] In some embodiments, oligonucleotides provided herein may be in the form of aptamers. Generally, in the context of molecular payloads, aptamer is any nucleic acid that binds specifically to a target, such as a small molecule, protein, nucleic acid in a cell. In some embodiments, the aptamer is a DNA aptamer or an RNA aptamer. In some embodiments, a nucleic acid aptamer is a single-stranded DNA or RNA (ssDNA or ssRNA). It is to be understood that a single-stranded nucleic acid aptamer may form helices and/or (e.g., and) loop structures. The nucleic acid that forms the nucleic acid aptamer may comprise naturally occurring nucleotides/nucleosides, modified nucleotides/nucleosides, naturally occurring nucleotides/nucleosides with hydrocarbon linkers (e.g., an alkylene) or a polyether linker (e.g., a PEG linker) inserted between one or more nucleotides/nucleosides, modified nucleotides/nucleosides with hydrocarbon or PEG linkers inserted between one or more nucleotides/nucleosides, or a combination of thereof. Exemplary publications and patents describing aptamers and method of producing aptamers include, e.g., Lorsch and Szostak, 1996; Jayasena, 1999; U.S. Pat. Nos. 5,270,163; 5,567,588; 5,650,275; 5,670,637; 5,683,867; 5,696,249; 5,789,157; 5,843,653; 5,864,026; 5,989,823; 6,569,630; 8,318,438 and PCT application WO 99/31275, each incorporated herein by reference.

[0690] y. Ribozymes

[0691] In some embodiments, oligonucleotides provided herein may be in the form of a ribozyme. A ribozyme (ribonucleic acid enzyme) is a molecule, typically an RNA molecule, that is capable of performing specific biochemical reactions, similar to the action of protein enzymes. Ribozymes are molecules with catalytic activities including the ability to cleave at specific phosphodiester linkages in RNA molecules to which they have hybridized, such as mRNAs, RNA-containing substrates, lncRNAs, and ribozymes, themselves.

[0692] Ribozymes may assume one of several physical structures, one of which is called a “hammerhead.” A hammerhead ribozyme is composed of a catalytic core containing nine conserved bases, a double-stranded stem and loop structure (stem-loop II), and two regions complementary to the target RNA flanking regions the catalytic core. The flanking regions enable the ribozyme to bind to the target RNA specifically by forming double-stranded stems I and III. Cleavage occurs in cis (i.e., cleavage of the same RNA molecule that contains the hammerhead motif) or in trans (cleavage of an RNA substrate other than that containing the ribozyme) next to a specific ribonucleotide triplet by a transesterification reaction from a 3′, 5′-phosphate diester to a 2′, 3′-cyclic phosphate diester. Without wishing to be bound by theory, it is believed that this catalytic activity requires the presence of specific, highly conserved sequences in the catalytic region of the ribozyme.

[0693] Modifications in ribozyme structure have also included the substitution or replacement of various non-core portions of the molecule with non-nucleotidic molecules. For example, Benseler et al. (J. Am. Chem. Soc. (1993) 115:8483-8484) disclosed hammerhead-like molecules in which two of the base pairs of stem II, and all four of the nucleotides of loop II were replaced with non-nucleoside linkers based on hexaethylene glycol, propanediol, bis(triethylene glycol) phosphate, tris(propanediol)bisphosphate, or bis(propanediol) phosphate. Ma et al. (Biochem. (1993) 32:1751-1758; Nucleic Acids Res. (1993) 21:2585-2589) replaced the six nucleotide loop of the TAR ribozyme hairpin with non-nucleotidic, ethylene glycol-related linkers. Thomson et al. (Nucleic Acids Res. (1993) 21:5600-5603) replaced loop II with linear, non-nucleotidic linkers of 13, 17, and 19 atoms in length.

[0694] Ribozyme oligonucleotides can be prepared using well known methods (see, e.g., PCT Publications WO9118624; WO9413688; WO9201806; and WO 92/07065; and U.S. Pat. Nos. 5,436,143 and 5,650,502) or can be purchased from commercial sources (e.g., US Biochemicals) and, if desired, can incorporate nucleotide analogs to increase the resistance of the oligonucleotide to degradation by nucleases in a cell. The ribozyme may be synthesized in any known manner, e.g., by use of a commercially available synthesizer produced, e.g., by Applied Biosystems, Inc. or Milligen. The ribozyme may also be produced in recombinant vectors by conventional means. See, Molecular Cloning: A Laboratory Manual, Cold Spring Harbor Laboratory (Current edition). The ribozyme RNA sequences may be synthesized conventionally, for example, by using RNA polymerases such as T7 or SP6.

[0695] z. Guide Nucleic Acids

[0696] In some embodiments, oligonucleotides are guide nucleic acid, e.g., guide RNA (gRNA) molecules. Generally, a guide RNA is a short synthetic RNA composed of (1) a scaffold sequence that binds to a nucleic acid programmable DNA binding protein (napDNAbp), such as Cas9, and (2) a nucleotide spacer portion that defines the DNA target sequence (e.g., genomic DNA target) to which the gRNA binds in order to bring the nucleic acid programmable DNA binding protein in proximity to the DNA target sequence. In some embodiments, the napDNAbp is a nucleic acid-programmable protein that forms a complex with (e.g., binds or associates with) one or more RNA(s) that targets the nucleic acid-programmable protein to a target DNA sequence (e.g., a target genomic DNA sequence). In some embodiments, a nucleic acid-programmable nuclease, when in a complex with an RNA, may be referred to as a nuclease:RNA complex. Guide RNAs can exist as a complex of two or more RNAs, or as a single RNA molecule.

[0697] Guide RNAs (gRNAs) that exist as a single RNA molecule may be referred to as single-guide RNAs (sgRNAs), though gRNA is also used to refer to guide RNAs that exist as either single molecules or as a complex of two or more molecules. Typically, gRNAs that exist as a single RNA species comprise two domains: (1) a domain that shares homology to a target nucleic acid (i.e., directs binding of a Cas9 complex to the target); and (2) a domain that binds a Cas9 protein. In some embodiments, domain (2) corresponds to a sequence known as a tracrRNA and comprises a stem-loop structure. In some embodiments, domain (2) is identical or homologous to a tracrRNA as provided in Jinek et al., Science 337:816-821 (2012), the entire contents of which is incorporated herein by reference.

[0698] In some embodiments, a gRNA comprises two or more of domains (1) and (2), and may be referred to as an extended gRNA. For example, an extended gRNA will bind two or more Cas9 proteins and bind a target nucleic acid at two or more distinct regions, as described herein. The gRNA comprises a nucleotide sequence that complements a target site, which mediates binding of the nuclease/RNA complex to said target site, providing the sequence specificity of the nuclease:RNA complex. In some embodiments, the RNA-programmable nuclease is the (CRISPR-associated system) Cas9 endonuclease, for example, Cas9 (Csn1) from Streptococcus pyogenes (see, e.g., “Complete genome sequence of an M1 strain of Streptococcus pyogenes.” Ferretti J. J., McShan W. M., Ajdic D. J., Savic D. J., Savic G., Lyon K., Primeaux C., Sezate S., Suvorov A. N., Kenton S., Lai H. S., Lin S. P., Qian Y., Jia H. G., Najar F. Z., Ren Q., Zhu H., Song L., White J., Yuan X., Clifton S. W., Roe B. A., McLaughlin R. E., Proc. Natl. Acad. Sci. U.S.A. 98:4658-4663 (2001); “CRISPR RNA maturation by trans-encoded small RNA and host factor RNase III.” Deltcheva E., Chylinski K., Sharma C. M., Gonzales K., Chao Y., Pirzada Z. A., Eckert M. R., Vogel J., Charpentier E., Nature 471:602-607 (2011); and “A programmable dual-RNA-guided DNA endonuclease in adaptive bacterial immunity.” Jinek M., Chylinski K., Fonfara I., Hauer M., Doudna J. A., Charpentier E. Science 337:816-821 (2012), the entire contents of each of which are incorporated herein by reference.

[0699] aa. Multimers

[0700] In some embodiments, molecular payloads may comprise multimers (e.g., concatemers) of 2 or more oligonucleotides connected by a linker. In this way, in some embodiments, the oligonucleotide loading of a complex/conjugate can be increased beyond the available linking sites on a targeting agent (e.g., available thiol sites on an antibody) or otherwise tuned to achieve a particular payload loading content. Oligonucleotides in a multimer can be the same or different (e.g., targeting different genes or different sites on the same gene or products thereof).

[0701] In some embodiments, multimers comprise 2 or more oligonucleotides linked together by a cleavable linker. However, in some embodiments, multimers comprise 2 or more oligonucleotides linked together by a non-cleavable linker. In some embodiments, a multimer comprises 2, 3, 4, 5, 6, 7, 8, 9, 10 or more oligonucleotides linked together. In some embodiments, a multimer comprises 2 to 5, 2 to 10 or 4 to 20 oligonucleotides linked together.

[0702] In some embodiments, a multimer comprises 2 or more oligonucleotides linked end-to-end (in a linear arrangement). In some embodiments, a multimer comprises 2 or more oligonucleotides linked end-to-end via an oligonucleotide based linker (e.g., poly-dT linker, an abasic linker). In some embodiments, a multimer comprises a 5′ end of one oligonucleotide linked to a 3′ end of another oligonucleotide. In some embodiments, a multimer comprises a 3′ end of one oligonucleotide linked to a 3′ end of another oligonucleotide. In some embodiments, a multimer comprises a 5′ end of one oligonucleotide linked to a 5′ end of another oligonucleotide. Still, in some embodiments, multimers can comprise a branched structure comprising multiple oligonucleotides linked together by a branching linker.

[0703] Further examples of multimers that may be used in the complexes provided herein are disclosed, for example, in US Patent Application Number 2015/0315588 A1, entitled Methods of delivering multiple targeting oligonucleotides to a cell using cleavable linkers, which was published on Nov. 5, 2015; US Patent Application Number 2015/0247141 A1, entitled Multimeric Oligonucleotide Compounds, which was published on Sep. 3, 2015, US Patent Application Number US 2011/0158937 A1, entitled Immunostimulatory Oligonucleotide Multimers, which was published on Jun. 30, 2011; and U.S. Pat. No. 5,693,773, entitled Triplex-Forming Antisense Oligonucleotides Having Abasic Linkers Targeting Nucleic Acids Comprising Mixed Sequences Of Purines And Pyrimidines, which issued on Dec. 2, 1997, the contents of each of which are incorporated herein by reference in their entireties.

[0704] ii. Small Molecules

[0705] Any suitable small molecule may be used as a molecular payload, as described herein. In some embodiments, the small molecule promotes exon skipping of MSTN (e.g., exon 2 of MSTN) sequences. In some embodiments, the small molecule is as described in International Patent Application Publication WO2013137832A1, published Sep. 19, 2013, entitled “Myostatin inhibitors”; the contents of which is incorporated herein in its entirety. In some embodiments, the small molecule inhibits formation of an INHBA oligomer or dimer. In some embodiments, the small molecule inhibits formation of activin A and/or inhibin A. In some embodiments, the small molecule inhibits the function of Inhibin, beta A (INHBA).

[0706] In some embodiments, the small molecule is an ACVR1B inhibitor. In some embodiments, the small molecule is SB-431542 or a derivative of SB-431542. In some embodiments, the small molecule is AZ12601011 or a derivative of AZ12601011. In some embodiments, the small molecule is SB-505124 or a derivative of SB-505124. In some embodiments, the small molecule is as described in Sun, Z. et al., “The TGF-β Pathway Mediates Doxorubicin Effects on Cardiac Endothelial Cells.” J Mol Cell Cardiol. 2016 January; 90: 129-138.; Spender L. C., et al. “Preclinical Evaluation of AZ12601011 and AZ12799734, Inhibitors of Transforming Growth Factor β Superfamily Type 1 Receptors.” Mol Pharmacol. 2019 February; 95(2):222-234.; DaCosta Byfield S. et al., “SB-505124 is a selective inhibitor of transforming growth factor-beta type I receptors ALK4, ALK5, and ALK7.” Mol Pharmacol. 2004 March; 65(3):744-52.; Inman, G. J. et al., “SB-431542 is a potent and specific inhibitor of transforming growth factor-beta superfamily type I activin receptor-like kinase (ALK) receptors ALK4, ALK5, and ALK7.” Mol Pharmacol. 2002 July; 62(1):65-74.; the contents of each of which are incorporated herein in their entirety.

### MLCK1

[0707] In some embodiments, the small molecule inhibits the expression of MLCK1. In some embodiments, the small molecule inhibits the function of MLCK1. In some embodiments, the small molecule binds to the catalytic kinase domain of MLCK1. In some embodiments, the small molecule inhibits the catalytic kinase activity of MLCK1. In some embodiments, the small molecule binds to a non-catalytic domain of MLCK1. In some embodiments, the small molecule inhibits MLCK1 recruitment to the perijunctional actomyosin ring (PAMR). In some embodiments, the small molecule inhibits MLCK1 recruitment to the perijunctional actomyosin ring (PAMR) and does not inhibit the catalytic kinase activity of MLCK1.

[0708] In some embodiments, the small molecule is divertin, or a derivative thereof. In some embodiments, the small molecule is rucaparib, ML-9, an isoquinoline, an isoquinoline alkaloid, berberine, or a derivative thereof

[0709] In some embodiments, the small molecule is as described in Vallen Graham, W. et. al., “Intracellular MLCK1 diversion reverses barrier loss to restore mucosal homeostasis.” Nature Medicine volume 25, 690-700, 2019.; McCrudden, C. M. et al., “Vasoactivity of rucaparib, a PARP-1 inhibitor, is a complex process that involves myosin light chain kinase, P2 receptors, and PARP itself.” PLoS One. 2015 Feb. 17; 10(2):e0118187.; Nakanishi, S. et al., “MS-347a, a new inhibitor of myosin light chain kinase from Aspergillus sp. KY52178.” J Antibiot (Tokyo). 1993 December; 46(12):1775-81.; Xu, Z. et al. “Berberine Depresses Contraction of Smooth Muscle via Inhibiting Myosin Light-chain Kinase.” Pharmacogn Mag. 2017 July-September; 13(51):454-458.; Saitoh M. et al., “Selective inhibition of catalytic activity of smooth muscle myosin light chain kinase.” J Biol Chem. 1987 Jun. 5; 262(16):7796-801.; Nakanishi S. et al., “K-252a, a novel microbial product, inhibits smooth muscle myosin light chain kinase.” J Biol Chem. 1988 May 5; 263(13):6215-9.; Kerendi F. et al., “Inhibition of myosin light chain kinase provides prolonged attenuation of radial artery vasospasm.” Eur J Cardiothorac Surg. 2004 December; 26(6):1149-55.; and Nakanishi S. et al., “Wortmannin, a microbial product inhibitor of myosin light chain kinase.” J Biol Chem. 1992 Feb. 5; 267(4):2157-63.; the contents of each of which are incorporated herein in their entirety.

### ACVR1

[0710] In some embodiments, the small molecule is as described in Mohedas, A. H. et al. “Development of an ALK2-biased BMP type I receptor kinase inhibitor”, ACS Chem Biol. 2013; 8(6):1291-302.; Sanvitale, C. E. et al., “A new class of small molecule inhibitor of BMP signaling”, PLoS One. 2013 Apr. 30; 8(4):e62721.; Kausar T. and S. M. Nayeem, “Identification of small molecule inhibitors of ALK2: a virtual screening, density functional theory, and molecular dynamics simulations study”, J Mol Model. 2018 Aug. 29; 24(9):262.; and International Patent Application Publication WO 2015/152183, published Nov. 8, 2015, “Prophylactic agent and therapeutic agent for fibrodysplasia ossificans progressive”; the entire contents of each of which are incorporated herein by reference. In some embodiments, the small molecule is as described in US Patent Application 2016/0075772, published Mar. 17, 2016, “Treatment of Fibrodysplasia Ossificans Progressiva”. In some embodiments, the small molecule is as described in WO 2016/121680, published Aug. 4, 2016, “Therapeutic agent for fibrodysplasia ossificans progressiva”. In some embodiments, the small molecule is rapamycin, temsirolimus, everolimus, ridaforolimus, TAFA93, umirolimus, olcorolimus, zotarolimus, or a related compound. In some embodiments, the small molecule is as described in US Patent Application 2018/031579, published Feb. 1, 2018, “Momelotinib for treating of acvr1-mediated diseases”. In some embodiments, the small molecule inhibits the expression of activin. In some embodiments, the small molecule inhibits the interaction between activin and activin A receptor type I. In some embodiments, the small molecule inhibits the expression or enzymatic activity of ACVR1. In some embodiments, the small molecule inhibits the signaling downstream of ACVR1. In some embodiments, the small molecule is an activin receptor type 2B (ACVR2B) antagonist used in combination with an activin receptor type 2A protein or peptide. In some embodiments, the small molecule is as described in Katagiri, T. et al. “Heterotopic bone induction via BMP signaling: Potential therapeutic targets for fibrodysplasia ossificans progressiva” Bone, 2017. In some embodiments, the small molecule is a RARγ agonist, e.g., Palovarotene. Additional examples of small molecules are included in Cappato, S. et al. “The Horizon of a Therapy for Rare Genetic Diseases: A “Druggable” Future for Fibrodysplasia Ossificans Progressiva” Int. J. Mol. Sci. 2018, 19(4), 989; Cappato, S et al, “High-throughput screening for modulators of ACVR1 transcription: discovery of potential therapeutics for fibrodysplasia ossificans progressiva.” Dis Model Mech. 2016 Jun. 1; 9(6):685-96.; and Kaplan, F. S. et al “Early clinical observations on the use of imatinib mesylate in FOP: A report of seven cases.” Bone. 2018 April; 109:276-280. The contents of each of the foregoing are incorporated herein by reference in their entireties. In some embodiments, the small molecule inhibitor of ACVR1 used in the complexes described herein is commercially available, e.g., DMH1 from Sigma-Aldrich (catalog #D8946).

### FBXO32

[0711] In some embodiments, the small molecule inhibits FBXO32 expression. In some embodiments, the small molecule inhibits the interaction between FBXO32 and one or more substrates. In some embodiments, the small molecule inhibits the interaction between FBXO32 and one or more proteins to be ubiquitinated and/or between FBXO32 and one or more components of the SCF complex. In some embodiments, the small molecule is gnetin C. In some embodiments, the small molecule is as described in JP201514031, which was granted on Nov. 1, 2017.

### TRIM63

[0712] In some embodiments, the small molecule disrupts the interaction between TRIM63 and one or more protein substrates. In some embodiments, the protein substrate is titin. In some embodiments, the small molecule inhibits TRIM63-dependent substrate ubiquitination. Non-limiting examples of small molecules targeting TRIM63 and/or TRIM63 activity are described in Bowen et al., J Cachexia Sarcopenia Muscle. 2017 December; 8(6):939-953; Adams et al., J Cachexia Sarcopenia Muscle. 2019 October; 10(5):1102-1115; and Eddins et al., Cell Biochem Biophys. 2011 June; 60(1-2):113-8. The contents of each of these publications listed above are incorporated herein in their entirety.

[0713] In some embodiments, the small molecule is lithium (e.g., as described in Linseman et al., J Neurochem. 2003 June; 85(6):1488-99, incorporated herein by reference). In some embodiments, the small molecule is Bis(3)-cognitin (e.g., as described in Yao et al., The Journal of Biological Chemistry, 287, 34246-34255, incorporated herein by reference). In some embodiments, the small molecule is retinoic acid (e.g., as described in Ma et al., Cancer Res; 74(5) Mar. 1, 2014, incorporated herein by reference).

### KLF15

[0714] In some embodiments, the small molecule increases the expression or function of KLF15. In some embodiments, the small molecule inhibits the expression or function of a protein or gene that represses KLF15 expression or function. In other embodiments, the small molecule decreases the expression or function of KLF15.

### MED1, MED13

[0715] In some embodiments, a small molecule for targeting MED1 or MED13 is a small molecule that specifically modulates protein-protein interactions between MED1 or MED13 and its interaction partners (e.g., other subunits of the Mediator complex, bromodomain-containing proteins such as BRD4, or CBP/p300). A small molecule that specifically modulates protein-protein interactions between MED1 or MED13 and its interaction partners may be a small molecule that binds to MED1 or MED13 and/or a small molecule that binds to the interaction partner. In some embodiments, a small molecule for targeting MED1 or MED13 is a small molecule that targets an epigentic modulator of MED1 or MED13 and/or epigenetic readers (e.g., BRD4). In some embodiments, a small molecule for targeting MED1 is small molecule that binds to BRD4 (e.g., JQ1 or a derivative of JQ1). In some embodiments, the small molecule is as described in Hermann, H. et al. “Small-molecule inhibition of BRD4 as a new potent approach to eliminate leukemic stem- and progenitor cells in acute myeloid leukemia AML” Oncotarget. 2012 December; 3(12):1588-99.; and International Patent Application WO2017/027571, entitled “Mechanism of resistance to bet bromodomain inhibitors”, which was published on Feb. 16, 2017; the contents of each of these publications listed above are incorporated herein in their entirety.

[0716] iii. Peptides/Proteins

[0717] Any suitable peptide or protein may be used as a molecular payload, as described herein. In some embodiments, a protein is an enzyme. These peptides or proteins may be produced, synthesized, and/or derivatized using several methodologies, e.g., phage displayed peptide libraries, one-bead one-compound peptide libraries, or positional scanning synthetic peptide combinatorial libraries. In some embodiments, the peptide or protein may comprise about 2-25 amino acids, about 2-20 amino acids, about 2-15 amino acids, about 2-10 amino acids, or about 2-5 amino acids. The peptide or protein may comprise naturally occurring amino acids, e.g., cysteine, alanine, or non-naturally occurring or modified amino acids. Non-naturally occurring amino acids include β-amino acids, homo-amino acids, proline derivatives, 3-substituted alanine derivatives, linear core amino acids, N-methyl amino acids, and others known in the art. In some embodiments, the peptide may be linear; in other embodiments, the peptide may be cyclic, e.g., bicyclic. MSTN

[0718] In some embodiments, the protein or peptide is as described in International Patent Application Publication WO2014119753A1, published on Aug. 7, 2014, entitled “Myostatin-inhibiting peptide”; International Patent Application Publication WO2004058988A2, published on Jul. 15, 2004, entitled “Binding agents which inhibit myostatin”; International Patent Application Publication WO2012024242A1, published on Feb. 23, 2012, entitled “Antibodies that bind myostatin, compositions and methods”; Takayama, K. et. al. “Chain-Shortened Myostatin Inhibitory Peptides Improve Grip Strength in Mice” ACS Med Chem Lett. 2019 May 28; 10(6):985-990.; Jin, Q. et. al. “A GDF11/myostatin inhibitor, GDF11 propeptide-Fc, increases skeletal muscle mass and improves muscle strength in dystrophic mdx mice” Skelet Muscle. 2019 May 27; 9(1):16.; Long, K. K. et. al., “Specific inhibition of myostatin activation is beneficial in mouse models of SMA therapy” Hum Mol Genet. 2019 Apr. 1; 28(7):1076-1089.; Campbell, C. et. al. “Myostatin inhibitor ACE-031 treatment of ambulatory boys with Duchenne muscular dystrophy: Results of a randomized, placebo-controlled clinical trial” Muscle Nerve. 2017 April; 55(4):458-464.; and Takayama, K. et. al., “Effect of N-Terminal Acylation on the Activity of Myostatin Inhibitory Peptides” ChemMedChem. 2016 Apr. 19; 11(8):845-9.; the contents of each of these publications listed above are incorporated herein in their entirety.

[0719] In some embodiments, a peptide or protein that targets MSTN selectively inhibits the activity of myostatin proteins. In some embodiments, a peptide or protein that targets MSTN selectively inhibits the activity of myostatin proteins comprises 10-50, 20-50, 20-40, 20-30, 10-100, 25-100, 50-100, or more than 100 amino acids. In some embodiments, a peptide or protein that targets MSTN is a Growth differentiation factor 11 (GDF11) polypeptide (e.g., a GDF11 propeptide-Fc fusion). In some embodiments, a peptide or protein that targets MSTN is a fusion protein of activin receptor type IIB and IgG1-Fc. In some embodiments, a peptide or protein that targets MSTN is a follistatin polypeptide (e.g., a recombinant mutant follistatin) that inhibits activity of myostatin protein. A follistatin polypeptide may comprise a follistatin N-terminal domain, a follistatin-1 domain, a follistatin-2 domain, a follistatin-3 domain and/or a follistatin C-terminal domain. In some embodiments, a peptide or protein that targets MSTN is an anti-MSTN antibody.

### INHBA

[0720] In some embodiments, a peptide or protein is as described in Chen, J. L. et al. “Development of Novel Activin-Targeted Therapeutics” Mol Ther. 2015 March; 23(3): 434-444.; Hu, J. et al. “Activin A inhibition attenuates sympathetic neural remodeling following myocardial infarction in rats” Mol Med Rep. 2018 April; 17(4): 5074-5080.; Yaden, B C et al. “Inhibition of activin A ameliorates skeletal muscle injury and rescues contractile properties by inducing efficient remodeling in female mice” Am J Pathol. 2014 April; 184(4):1152-66.; U.S. Patent Application Publication US20180273599, published on Sep. 27, 2018, and entitled “Inhibin Analogs”; the entire contents of which is incorporated herein in its entirety.

[0721] In some embodiments, a peptide or protein that targets INHBA selectively inhibits the formation of oligomers or dimers comprising INHBA. In some embodiments, the peptide or protein inhibits formation of activin A and/or inhibin A. In some embodiments, a peptide or protein that targets INHBA selectively inhibits the function of Inhibin, beta A (INHBA). In some embodiments, a peptide or protein that targets INHBA is a modified activin A and/or activin B prodomain. In some embodiments, a peptide or protein that targets INHBA is follistatin or a derivative thereof. A peptide or protein that targets INHBA comprises 10-50, 20-50, 20-40, 20-30, 10-100, 25-100, 50-100, or more than 100 amino acids. In some embodiments, a peptide or protein that targets INHBA is an Inhibin analog. In some embodiments, a peptide or protein that targets INHBA is an anti-INHBA antibody.

### ACVR1

[0722] In some embodiments, a protein is a truncated ACVR1B protein. In some embodiments, a truncated ACVR1B protein competes with endogenous, full-length ACVR1B for binding to activin receptor type-2 proteins. In some embodiments, a truncated ACVR1B protein cannot be phosphorylated. A truncated ACVR1B protein that cannot be phosphorylated cannot transduce activin signaling. In some embodiments, a truncated ACVR1B protein is truncated at its C-terminal end. A truncated ACVR1B protein may lack most of subdomain XI of full-length ACVR1, may lack subdomains X and XI of full-length ACVR1, or may lack kinase subdomains IX-XI and part of subdomain VIII of full-length ACVR1.

[0723] In some embodiments, the protein or peptide is as described in Zhou, Y. et al. “Truncated Activin Type I Receptor Alk4 Isoforms Are Dominant Negative Receptors Inhibiting Activin Signaling.” Molecular Endocrinology, 2000, 14:12, 2066-2075.; International Patent Application Publication WO 2016/161477, entitled “A method of treating neoplasias”, filed on Mar. 23, 2016; the contents of each of these publications listed above are incorporated herein in their entirety.

### MLCK1

[0724] In some embodiments, the peptide or protein inhibits the expression of MLCK1. In some embodiments, the peptide or protein inhibits the function of MLCK1. In some embodiments, the peptide or protein binds to the catalytic kinase domain of MLCK1. In some embodiments, the peptide or protein inhibits the catalytic kinase activity of MLCK1. In some embodiments, the peptide or protein binds to a non-catalytic domain of MLCK1. In some embodiments, the peptide or protein inhibits MLCK1 recruitment to the perijunctional actomyosin ring (PAMR). In some embodiments, the peptide or protein inhibits MLCK1 recruitment to the perijunctional actomyosin ring (PAMR) and does not inhibit the catalytic kinase activity of MLCK1.

[0725] In some embodiments, the protein or peptide is as described in Ikebe M. et al., “Primary structure required for the inhibition of smooth muscle myosin light chain kinase.” FEBS Lett. 1992 Nov. 9; 312(2-3):245-8.; and Hunt, J. T. et al., “Minimum requirements for inhibition of smooth-muscle myosin light-chain kinase by synthetic peptides.” Biochem J. 1989 Jan. 1; 257(1):73-8.; the contents of each of which are incorporated herein in their entirety.

### ACVR1

[0726] In some embodiments, the peptide or protein for modulating ACVR1 activity is a BMP inhibitor such as regulatory SMAD 6 and 7 or fragment thereof. Additional examples of peptides or proteins are included in Cappato, S. et al. “The Horizon of a Therapyf or Rare Genetic Diseases: A “Druggable” Future for Fibrodysplasia Ossificans Progressiva” Int. J. Mol. Sci. 2018, 19(4), 989. The contents of each of the foregoing are incorporated herein by reference in their entireties.

### FBXO32

[0727] As a non-limiting example, the protein or peptide is an anti-FBXO32 antibody, PGC-1α, or PGC-I β. In some embodiments, the protein or peptide is as described in Bdolah et al., Am J Physiol Regul Integr Comp Physiol. 2007 February; 292(2):R971-6; Sandri et al., Cell 117:399-412, 2006; and WO2008156561, entitled, “METHODS AND COMPOSITIONS FOR THE TREATMENT AND DIAGNOSIS OF STATIN-INDUCED MYOPATHY,” which was published on Dec. 24, 2008. The contents of each of these publications listed above are incorporated herein in their entirety.

### TRIM63

[0728] In some embodiments, the protein or peptide is a TRIM63 antibody. See, e.g., de Palma et al., Joint Bone Spine. 2008 January; 75(1):53-7; and Clarke et al., Cell Metab. 2007 November; 6(5):376-85. The contents of each of these publications listed above are incorporated herein in their entirety.

### MEF2D

[0729] In some embodiments, a protein or peptide is a MEF2D antibody (e.g., as described in Li et al., Journal of Neuroscience 1 Sep. 2001, 21 (17) 6544-6552, incorporated herein by reference). MEF2D antibodies are also commercially available, e.g., from Abcam (catalog #AB32845) and Thermo Fisher Scientific (catalog #MA5-268909).

### KLF15

[0730] In some embodiments, the peptide or protein increases the expression or function of KLF15. In some embodiments, the peptide or protein inhibits the expression or function of a protein or gene that represses KLF15 expression or function. In other embodiments, the peptide or protein decreases the expression or function of KLF15.

[0731] In some embodiments, a peptide or protein is a KLF15 peptide or protein. In some embodiments, the KLF15 peptide or protein functions in the same manner as endogenous KLF15 (e.g., to inhibit cardiac transcription factors, such as MEF2, GATA4, and myocardin). In some embodiments, the KLF15 peptide or protein has at least 50% of the functional activity of endogenous KLF15 (e.g., at least 60%, 70%, 80%, 90%, or more). In some embodiments, the KLF15 peptide or protein is a full-length KLF15 protein.

### MED1, MED13

[0732] In some embodiments, a peptide or protein for targeting MED1 or MED13 is a peptide or protein that specifically modulates protein-protein interactions between MED1 or MED13 and its interaction partners (e.g., other subunits of the Mediator complex, bromodomain-containing proteins such as BRD4, or CBP/p300). A peptide or protein that specifically modulates protein-protein interactions between MED1 or MED13 and its interaction partners may be a peptide or protein that binds to MED1 or MED13 and/or a small molecule that binds to the interaction partner. In some embodiments, a peptide or protein for targeting MED1 or MED13 is an antibody (e.g., an anti-MED1 antibody or an anti-MED13 antibody).

[0733] iv. Nucleic Acid Constructs

[0734] Any suitable gene expression construct may be used as a molecular payload, as described herein. In some embodiments, a gene expression construct may be a vector or a cDNA fragment. In some embodiments, a gene expression construct may be messenger RNA (mRNA). In some embodiments, a mRNA used herein may be a modified mRNA, e.g., as described in U.S. Pat. No. 8,710,200, issued on Apr. 24, 2014, entitled “Engineered nucleic acids encoding a modified erythropoietin and their expression”. In some embodiments, a mRNA may comprise a 5′ methyl cap. In some embodiments, a mRNA may comprise a polyA tail, optionally of up to 160 nucleotides in length.

[0735] A gene expression construct may encode a sequence of a protein that reduces the expression or activity of myostatin. A gene expression construct may encode a sequence of a protein that is a peptide or protein analog of INHBA that inhibits or disrupts the formation of INHBA dimers or oligomers. In some embodiments, the gene expression construct inhibits or disrupts the formation of activin A and/or inhibin A. A gene expression construct may encode a sequence of a protein that is a truncated ACVR1B protein. In some embodiments, a truncated ACVR1B protein competes with endogenous, full-length ACVR1B for binding to activin receptor type-2 proteins. In some embodiments, a truncated ACVR1B protein cannot be phosphorylated. A truncated ACVR1B protein that cannot be phosphorylated cannot transduce activin signaling. In some embodiments, a truncated ACVR1B protein is truncated at its C-terminal end. A truncated ACVR1B protein may lack most of subdomain XI of full-length ACVR1, may lack subdomains X and XI of full-length ACVR1, or may lack kinase subdomains IX-XI and part of subdomain VIII of full-length ACVR1. In some embodiments, the gene expression construct may be expressed, e.g., overexpressed, within the nucleus of a muscle cell. In some embodiments, the gene expression construct encodes a Growth differentiation factor 11 (GDF11) polypeptide (e.g., a GDF11 propeptide-Fc fusion), a fusion protein of activin receptor type IIB and IgG1-Fc, a follistatin polypeptide (e.g., a recombinant mutant follistatin, e.g., comprising a follistatin N-terminal domain, a follistatin-1 domain, a follistatin-2 domain, a follistatin-3 domain and/or a follistatin C-terminal domain), or an anti-MSTN antibody. In some embodiments, the gene expression constructs encode a protein that comprises at least one zinc finger. In some embodiments, the gene expression construct encodes a protein that leads to a reduction in the expression of a MSTN gene. In some embodiments, the gene expression construct encodes a protein that leads to a reduction in the expression of an INHBA gene. In some embodiments, the gene expression construct encodes a protein that binds to an ACVR1B gene. In some embodiments, the gene expression construct encodes a protein that leads to a reduction in the expression of an ACVR1B gene.

### MLCK1

[0736] A gene expression construct may encode a sequence of a protein that inhibits the expression of MLCK1. In some embodiments, the gene expression construct may encode a protein that inhibits the function of MLCK1. In some embodiments, the gene expression construct may encode a protein that binds to the catalytic kinase domain of MLCK1. In some embodiments, the gene expression construct may encode a protein that inhibits the catalytic kinase activity of MLCK1. In some embodiments, the gene expression construct may encode a protein that binds to a non-catalytic domain of MLCK1. In some embodiments, the gene expression construct may encode a protein that inhibits MLCK1 recruitment to the perijunctional actomyosin ring (PAMR). In some embodiments, the gene expression construct may encode a protein inhibits MLCK1 recruitment to the perijunctional actomyosin ring (PAMR) and does not inhibit the catalytic kinase activity of MLCK1. In some embodiments, the gene expression construct may be expressed, e.g., overexpressed, within the nucleus of a muscle cell. In some embodiments, the gene expression constructs encode a protein that comprises at least one zinc finger. In some embodiments, the gene expression construct encodes a protein that leads to a reduction in the expression of a MLCK1.

### ACVR1

[0737] A gene expression construct may encode a sequence of a protein that leads to decreased expression of ACVR1 gene or decreased activity of ACVR1 protein. In some embodiments, the gene expression construct may be expressed, e.g., overexpressed, within the nucleus of a muscle cell. In some embodiments, the gene expression construct encodes a protein that inhibit the function of epigenetic regulators that regulate the expression of ACVR1. In some embodiments, the gene expression construct encodes a protein that leads to a reduction in the expression of an epigenetic regulators that negatively regulate the expression of ACVR1, e.g., histone deactylases. In some embodiments, the gene expression construct encodes a gene editing enzyme. In some embodiments, the gene expression construct encodes activin. In some embodiments, the gene expression construct encodes a protein capable of inhibiting the function of ACVR1 protein. In some embodiments, the gene expression construct encodes an oligonucleotide (e.g., shRNA) that inhibits expression of ACVR1. In some embodiments, the gene expression construct encodes a protein that leads to a reduction in the expression of a ACVR1 gene.

### FBXO32

[0738] In some embodiments, a gene expression construct may encode FBXO32. In some embodiments, a gene expression construct may encode a sequence of a protein that inhibits the expression of FBXO32 or inhibits FBOX32 activity. As a non-limiting example, PGC-1α expression has been shown to inhibit FBXO32 expression. See, e.g., Sandri et al., Cell 117:399-412, 2006 and WO2008156561, entitled, “METHODS AND COMPOSITIONS FOR THE TREATMENT AND DIAGNOSIS OF STATIN-INDUCED MYOPATHY,” which was published on Dec. 24, 2008. In some instances, a molecular payload is a nucleic acid encoding PGC-I β. See, e.g., WO2008156561, entitled, “METHODS AND COMPOSITIONS FOR THE TREATMENT AND DIAGNOSIS OF STATIN-INDUCED MYOPATHY,” which was published on Dec. 24, 2008. In some instances, a molecular payload is a nucleic acid encoding a FBXO32 antibody. In some embodiments, the gene expression construct may be expressed, e.g., overexpressed, within the nucleus of a muscle cell. In some embodiments, the gene expression constructs encode a protein that comprises at least one zinc finger. In some embodiments, the gene expression construct encodes a protein that leads to a reduction in the expression of a FBXO32.

### TRIM63

[0739] A gene expression construct may encode a sequence of a protein that is a TRIM63 antibody. In some embodiments, the gene expression construct may be expressed, e.g., overexpressed, within the nucleus of a muscle cell. In some embodiments, the gene expression construct encodes a TRIM63 antibody. In some embodiments, the gene expression constructs encode a protein that comprises at least one zinc finger. In some embodiments, the gene expression construct encodes a protein that binds to a TRIM63 and/or prevents the interaction between TRIM63 and one or more TRIM63 substrates (e.g., titin). In some embodiments, the gene expression construct encodes a protein that leads to a reduction in the expression of a TRIM63.

### MEF2D, KLF15, MED1, MED13, or PPP1R3A

[0740] A gene expression construct may encode MEF2D, KLF15, MED1, MED13, or PPP1R3A. A gene expression construct may encode a peptide or protein targeting MEF2D, KLF15, MED1, MED13, or PPP1R3A.

[0741] In some embodiments, the gene expression construct encodes a specific isoform of MEF2D. In some embodiments, the gene expression construct encodes a protein that binds to MEF2D or its binding partner (e.g., Hsc70, as described in Lee et al., J. Biol. Chem. 285: 33779-33787, 2010, incorporated herein by reference) to disrupt the interaction between MEF2D and its binding partner. In some embodiments, the gene expression construct encodes a protein that leads to a reduction in the expression of a MEF2D. In some embodiments, the gene expression construct encodes an MEF2D antibody.

[0742] In some embodiments, the gene expression construct encodes a specific isoform of KLF15. In some embodiments, the KLF15 peptide or protein functions in the same manner as endogenous KLF15 (e.g., to inhibit cardiac transcription factors, such as MEF2, GATA4, and myocardin). In some embodiments, the KLF15 peptide or protein has at least 50% of the functional activity of endogenous KLF15 (e.g., at least 60%, 70%, 80%, 90%, or more). In some embodiments, the KLF15 peptide or protein is a full-length KLF15 protein. In some embodiments, the gene expression construct encodes a protein that binds to a cardiac transcription factor, such as MEF2, GATA4, or myocardin, for inhibition of these cardiac transcription factors and their function. In some embodiments, the gene expression construct encodes a protein that leads to an increase in the expression of a KLF15.

[0743] In some embodiments, the gene expression construct encodes a peptide or protein for targeting MED1 (e.g., an anti-MED1 antibody). In some embodiments, the gene expression construct encodes a protein that binds to MED1 or an interaction partner of MED1 (e.g., other subunits of the Mediator complex, bromodomain-containing proteins such as BRD4, or CBP/p300). In some embodiments, the gene expression construct encodes MED1 or a portion of MED1. In some embodiments, the gene expression construct encodes a protein that changes the expression of a MED1 gene (e.g., increases expression of a MED1 gene).

[0744] A gene expression construct may encode a sequence of a protein that encodes a peptide or protein for targeting MED13 (e.g., an anti-MED13 antibody). In some embodiments, the gene expression construct may be expressed, e.g., overexpressed, within the nucleus of a muscle cell. In some embodiments, the gene expression constructs encode a protein that comprises at least one zinc finger. In some embodiments, the gene expression construct encodes a protein that binds to MED13 or an interaction partner of MED13 (e.g., cyclin C, CDK8, MED12). In some embodiments, the gene expression construct encodes a protein that leads to a reduction in the expression of a mutant MED13 gene. In some embodiments, the gene expression construct encodes a protein that leads to an increase in the expression of a wild-type MED13 gene. In some embodiments, the gene expression construct encodes MED13, or a portion of MED13.

[0745] In some embodiments, the gene expression construct may be expressed, e.g., overexpressed, within the nucleus of a muscle cell. In some embodiments, the gene expression construct encodes a protein that comprises at least one zinc finger. In some embodiments, the gene expression construct encodes a gene editing enzyme. Additional examples of nucleic acid constructs that may be used as molecular payloads are provided in International Patent Application Publication WO2017152149A1, published on Sep. 19, 2017, entitled, “CLOSED-ENDED LINEAR DUPLEX DNA FOR NON-VIRAL GENE TRANSFER”; U.S. Pat. No. 8,853,377B2, issued on Oct. 7, 2014, entitled, “MRNA FOR USE IN TREATMENT OF HUMAN GENETIC DISEASES”; and U.S. Pat. No. 8,822,663B2, issued on Sep. 2, 2014, ENGINEERED NUCLEIC ACIDS AND METHODS OF USE THEREOF,” the contents of each of which are incorporated herein by reference in their entireties.

[0746] C. Linkers

[0747] Complexes described herein generally comprise a linker that covalently links any one of the anti-TfR1 antibodies described herein to a molecular payload. A linker comprises at least one covalent bond. In some embodiments, a linker may be a single bond, e.g., a disulfide bond or disulfide bridge, that covalently links an anti-TfR1 antibody to a molecular payload. However, in some embodiments, a linker may covalently link any one of the anti-TfR1 antibodies described herein to a molecular payload through multiple covalent bonds. In some embodiments, a linker may be a cleavable linker. However, in some embodiments, a linker may be a non-cleavable linker. A linker is typically stable in vitro and in vivo, and may be stable in certain cellular environments. Additionally, typically a linker does not negatively impact the functional properties of either the anti-TfR1 antibody or the molecular payload. Examples and methods of synthesis of linkers are known in the art (see, e.g., Kline, T. et al. “Methods to Make Homogenous Antibody Drug Conjugates.” Pharmaceutical Research, 2015, 32:11, 3480-3493.; Jain, N. et al. “Current ADC Linker Chemistry” Pharm Res. 2015, 32:11, 3526-3540.; McCombs, J. R. and Owen, S. C. “Antibody Drug Conjugates: Design and Selection of Linker, Payload and Conjugation Chemistry” AAPS J. 2015, 17:2, 339-351.).

[0748] A linker typically will contain two different reactive species that allow for attachment to both the anti-TfR1 antibody and a molecular payload. In some embodiments, the two different reactive species may be a nucleophile and/or an electrophile. In some embodiments, a linker contains two different electrophiles or nucleophiles that are specific for two different nucleophiles or electrophiles. In some embodiments, a linker is covalently linked to an anti-TfR1 antibody via conjugation to a lysine residue or a cysteine residue of the anti-TfR1 antibody. In some embodiments, a linker is covalently linked to a cysteine residue of an anti-TfR1 antibody via a maleimide-containing linker, wherein optionally the maleimide-containing linker comprises a maleimidocaproyl or maleimidomethyl cyclohexane-1-carboxylate group. In some embodiments, a linker is covalently linked to a cysteine residue of an anti-TfR1 antibody or thiol functionalized molecular payload via a 3-arylpropionitrile functional group. In some embodiments, a linker is covalently linked to a lysine residue of an anti-TfR1 antibody. In some embodiments, a linker is covalently linked to an anti-TfR1 antibody and/or (e.g., and) a molecular payload, independently, via an amide bond, a carbamate bond, a hydrazide, a triazole, a thioether, and/or a disulfide bond.

[0749] i. Cleavable Linkers

[0750] A cleavable linker may be a protease-sensitive linker, a pH-sensitive linker, or a glutathione-sensitive linker. These linkers are typically cleavable only intracellularly and are preferably stable in extracellular environments, e.g., extracellular to a muscle cell.

[0751] Protease-sensitive linkers are cleavable by protease enzymatic activity. These linkers typically comprise peptide sequences and may be 2-10 amino acids, about 2-5 amino acids, about 5-10 amino acids, about 10 amino acids, about 5 amino acids, about 3 amino acids, or about 2 amino acids in length. In some embodiments, a peptide sequence may comprise naturally occurring amino acids, e.g., cysteine, alanine, or non-naturally occurring or modified amino acids. Non-naturally occurring amino acids include 3-amino acids, homo-amino acids, proline derivatives, 3-substituted alanine derivatives, linear core amino acids, N-methyl amino acids, and others known in the art. In some embodiments, a protease-sensitive linker comprises a valine-citrulline or alanine-citrulline sequence. In some embodiments, a protease-sensitive linker can be cleaved by a lysosomal protease, e.g., cathepsin B, and/or (e.g., and) an endosomal protease.

[0752] A pH-sensitive linker is a covalent linkage that readily degrades in high or low pH environments. In some embodiments, a pH-sensitive linker may be cleaved at a pH in a range of 4 to 6. In some embodiments, a pH-sensitive linker comprises a hydrazone or cyclic acetal. In some embodiments, a pH-sensitive linker is cleaved within an endosome or a lysosome.

[0753] In some embodiments, a glutathione-sensitive linker comprises a disulfide moiety. In some embodiments, a glutathione-sensitive linker is cleaved by a disulfide exchange reaction with a glutathione species inside a cell. In some embodiments, the disulfide moiety further comprises at least one amino acid, e.g., a cysteine residue.

[0754] In some embodiments, a linker comprises a valine-citrulline sequence (e.g., as described in U.S. Pat. No. 6,214,345, incorporated herein by reference). In some embodiments, before conjugation, a linker comprises a structure of:

[chemical structure]

[0755] In some embodiments, after conjugation, a linker comprises a structure of:

[chemical structure]

[0756] In some embodiments, before conjugation, a linker comprises a structure of:

[chemical structure]

wherein n is any number from 0-10. In some embodiments, n is 3.

[0757] In some embodiments, a linker comprises a structure of:

[chemical structure]

wherein n is any number from 0-10, wherein m is any number from 0-10. In some embodiments, n is 3 and/or (e.g., and) m is 4.

[0758] In some embodiments, a linker comprises a structure of:

[chemical structure]

wherein n is any number from 0-10, wherein m is any number from 0-10. In some embodiments, n is 3 and/or (e.g., and) m is 4.

[0759] ii. Non-Cleavable Linkers

[0760] In some embodiments, non-cleavable linkers may be used. Generally, a non-cleavable linker cannot be readily degraded in a cellular or physiological environment. In some embodiments, a non-cleavable linker comprises an optionally substituted alkyl group, wherein the substitutions may include halogens, hydroxyl groups, oxygen species, and other common substitutions. In some embodiments, a linker may comprise an optionally substituted alkyl, an optionally substituted alkylene, an optionally substituted arylene, a heteroarylene, a peptide sequence comprising at least one non-natural amino acid, a truncated glycan, a sugar or sugars that cannot be enzymatically degraded, an azide, an alkyne-azide, a peptide sequence comprising a LPXT sequence, a thioether, a biotin, a biphenyl, repeating units of polyethylene glycol or equivalent compounds, acid esters, acid amides, sulfamides, and/or an alkoxy-amine linker. In some embodiments, sortase-mediated ligation can be utilized to covalently link an anti-TfR1 antibody comprising a LPXT sequence to a molecular payload comprising a (G)ₙ sequence (see, e.g., Proft T. Sortase-mediated protein ligation: an emerging biotechnology tool for protein modification and immobilization. Biotechnol Lett. 2010, 32(1):1-10.).

[0761] In some embodiments, a linker may comprise a substituted alkylene, an optionally substituted alkenylene, an optionally substituted alkynylene, an optionally substituted cycloalkylene, an optionally substituted cycloalkenylene, an optionally substituted arylene, an optionally substituted heteroarylene further comprising at least one heteroatom selected from N, O, and S; an optionally substituted heterocyclylene further comprising at least one heteroatom selected from N, O, and S, an imino, an optionally substituted nitrogen species, an optionally substituted oxygen species O, an optionally substituted sulfur species, or a poly(alkylene oxide), e.g. polyethylene oxide or polypropylene oxide. In some embodiments, a linker may be a non-cleavable N-gamma-maleimidobutyryl-oxysuccinimide ester (GMBS) linker.

[0762] iii. Linker Conjugation

[0763] In some embodiments, a linker is covalently linked to an anti-TfR1 antibody and/or (e.g., and) molecular payload via a phosphate, thioether, ether, carbon-carbon, carbamate, or amide bond. In some embodiments, a linker is covalently linked to an oligonucleotide through a phosphate or phosphorothioate group, e.g., a terminal phosphate of an oligonucleotide backbone. In some embodiments, a linker is covalently linked to an anti-TfR1 antibody, through a lysine or cysteine residue present on the anti-TfR1 antibody.

[0764] In some embodiments, a linker, or a portion thereof is covalently linked to an anti-TfR1 antibody and/or (e.g., and) molecular payload by a cycloaddition reaction between an azide and an alkyne to form a triazole, wherein the azide or the alkyne may be located on the anti-TfR1 antibody, molecular payload, or the linker. In some embodiments, an alkyne may be a cyclic alkyne, e.g., a cyclooctyne. In some embodiments, an alkyne may be bicyclononyne (also known as bicyclo[6.1.0]nonyne or BCN) or substituted bicyclononyne. In some embodiments, a cyclooctyne is as described in International Patent Application Publication WO2011136645, published on Nov. 3, 2011, entitled, “Fused Cyclooctyne Compounds And Their Use In Metal-free Click Reactions”. In some embodiments, an azide may be a sugar or carbohydrate molecule that comprises an azide. In some embodiments, an azide may be 6-azido-6-deoxygalactose or 6-azido-N-acetylgalactosamine. In some embodiments, a sugar or carbohydrate molecule that comprises an azide is as described in International Patent Application Publication WO2016170186, published on Oct. 27, 2016, entitled, “Process For The Modification Of A Glycoprotein Using A Glycosyltransferase That Is Or Is Derived From A β(1,4)-N-Acetylgalactosaminyltransferase”. In some embodiments, a cycloaddition reaction between an azide and an alkyne to form a triazole, wherein the azide or the alkyne may be located on the anti-TfR1 antibody, molecular payload, or the linker is as described in International Patent Application Publication WO2014065661, published on May 1, 2014, entitled, “Modified antibody, antibody-conjugate and process for the preparation thereof”; or International Patent Application Publication WO2016170186, published on Oct. 27, 2016, entitled, “Process For The Modification Of A Glycoprotein Using A Glycosyltransferase That Is Or Is Derived From A β(1,4)-N-Acetylgalactosaminyltransferase”.

[0765] In some embodiments, a linker comprises a spacer, e.g., a polyethylene glycol spacer or an acyl/carbomoyl sulfamide spacer, e.g., a HydraSpace™ spacer. In some embodiments, a spacer is as described in Verkade, J. M. M. et al., “A Polar Sulfamide Spacer Significantly Enhances the Manufacturability, Stability, and Therapeutic Index of Antibody-Drug Conjugates”, Antibodies, 2018, 7, 12.

[0766] In some embodiments, a linker is covalently linked to an anti-TfR1 antibody and/or (e.g., and) molecular payload by the Diels-Alder reaction between a dienophile and a diene/hetero-diene, wherein the dienophile or the diene/hetero-diene may be located on the anti-TfR1 antibody, molecular payload, or the linker. In some embodiments a linker is covalently linked to an anti-TfR1 antibody and/or (e.g., and) molecular payload by other pericyclic reactions such as an ene reaction. In some embodiments, a linker is covalently linked to an anti-TfR1 antibody and/or (e.g., and) molecular payload by an amide, thioamide, or sulfonamide bond reaction. In some embodiments, a linker is covalently linked to an anti-TfR1 antibody and/or (e.g., and) molecular payload by a condensation reaction to form an oxime, hydrazone, or semicarbazide group existing between the linker and the anti-TfR1 antibody and/or (e.g., and) molecular payload.

[0767] In some embodiments, a linker is covalently linked to an anti-TfR1 antibody and/or (e.g., and) molecular payload by a conjugate addition reaction between a nucleophile, e.g., an amine or a hydroxyl group, and an electrophile, e.g., a carboxylic acid, carbonate, or an aldehyde. In some embodiments, a nucleophile may exist on a linker and an electrophile may exist on an anti-TfR1 antibody or molecular payload prior to a reaction between a linker and an anti-TfR1 antibody or molecular payload. In some embodiments, an electrophile may exist on a linker and a nucleophile may exist on an anti-TfR1 antibody or molecular payload prior to a reaction between a linker and an anti-TfR1 antibody or molecular payload. In some embodiments, an electrophile may be an azide, pentafluorophenyl, a silicon centers, a carbonyl, a carboxylic acid, an anhydride, an isocyanate, a thioisocyanate, a succinimidyl ester, a sulfosuccinimidyl ester, a maleimide, an alkyl halide, an alkyl pseudohalide, an epoxide, an episulfide, an aziridine, an aryl, an activated phosphorus center, and/or an activated sulfur center. In some embodiments, a nucleophile may be an optionally substituted alkene, an optionally substituted alkyne, an optionally substituted aryl, an optionally substituted heterocyclyl, a hydroxyl group, an amino group, an alkylamino group, an anilido group, and/or a thiol group.

[0768] In some embodiments, a linker comprises a valine-citrulline sequence covalently linked to a reactive chemical moiety (e.g., an azide moiety or a BCN moiety for click chemistry). In some embodiments, a linker comprising a valine-citrulline sequence covalently linked to a reactive chemical moiety (e.g., an azide moiety for click chemistry) comprises a structure of:

[chemical structure]

wherein n is any number from 0-10. In some embodiments, n is 3.

[0769] In some embodiments, a linker comprising the structure of Formula (A) is covalently linked (e.g., optionally via additional chemical moieties) to a molecular payload (e.g., an oligonucleotide). In some embodiments, a linker comprising the structure of Formula (A) is covalently linked to an oligonucleotide, e.g., through a nucleophilic substitution with amine-L1-oligonucleotides forming a carbamate bond, yielding a compound comprising a structure of:

[chemical structure]

wherein n is any number from 0-10. In some embodiments, n is 3.

[0770] In some embodiments, the compound of Formula (B) is further covalently linked via a triazole to additional moieties, wherein the triazole is formed by a click reaction between the azide of Formula (A) or Formula (B) and an alkyne provided on a bicyclononyne. In some embodiments, a compound comprising a bicyclononyne comprises a structure of:

[chemical structure]

wherein m is any number from 0-10. In some embodiments, m is 4.

[0771] In some embodiments, the azide of the compound of structure (B) forms a triazole via a click reaction with the alkyne of the compound of structure (C), forming a compound comprising a structure of:

[chemical structure]

wherein n is any number from 0-10, and wherein m is any number from 0-10. In some embodiments, n is 3 and m is 4.

[0772] In some embodiments, the compound of structure (D) is further covalently linked to a lysine of the anti-TfR1 antibody, forming a complex comprising a structure of:

[chemical structure]

wherein n is any number from 0-10, wherein m is any number from 0-10. In some embodiments, n is 3 and/or (e.g., and) m is 4. It should be understood that the amide shown adjacent the anti-TfR1 antibody in Formula (E) results from a reaction with an amine of the anti-TfR1 antibody, such as a lysine epsilon amine.

[0773] In some embodiments, the compound of Formula (C) is further covalently linked to a lysine of the anti-TfR1 antibody, forming a compound comprising a structure of:

[chemical structure]

wherein m is 0-15 (e.g., 4). It should be understood that the amide shown adjacent the anti-TfR1 antibody in Formula (F) results from a reaction with an amine of the anti-TfR1 antibody, such as a lysine epsilon amine.

[0774] In some embodiments, the azide of the compound of structure (B) forms a triazole via a click reaction with the alkyne of the compound of structure (F), forming a complex comprising a structure of:

[chemical structure]

wherein n is any number from 0-10, wherein m is any number from 0-10. In some embodiments, n is 3 and/or (e.g., and) m is 4. It should be understood that the amide shown adjacent the anti-TfR1 antibody in Formula (E) results from a reaction with an amine of the anti-TfR1 antibody, such as a lysine epsilon amine.

[0775] In some embodiments, the azide of the compound of structure (A) forms a triazole via a click reaction with the alkyne of the compound of structure (F), forming a compound comprising: a structure of:

[chemical structure]

wherein n is any number from 0-10, wherein m is any number from 0-10. In some embodiments, n is 3 and/or (e.g., and) m is 4. In some embodiments, an oligonucleotide is covalently linked to a compound comprising a structure of formula (G), thereby forming a complex comprising a structure of formula (E). It should be understood that the amide shown adjacent the anti-TfR1 antibody in Formula (G) results from a reaction with an amine of the anti-TfR1 antibody, such as a lysine epsilon amine.

[0776] In some embodiments, in any one of the complexes described herein, the anti-TfR1 antibody is covalently linked via a lysine of the anti-TfR1 antibody to a molecular payload (e.g., an oligonucleotide) via a linker comprising a structure of:

[chemical structure]

wherein n is any number from 0-10, wherein m is any number from 0-10. In some embodiments, n is 3 and/or (e.g., and) m is 4.

[0777] In some embodiments, in any one of the complexes described herein, the anti-TfR1 antibody is covalently linked via a lysine of the anti-TfR1 antibody to a molecular payload (e.g., an oligonucleotide) via a linker comprising a structure of:

[chemical structure]

wherein n is any number from 0-10, wherein m is any number from 0-10. In some embodiments, n is 3 and/or (e.g., and) m is 4.

[0778] In some embodiments, in formulae (B), (D), (E), and (I), L1 is a spacer that is a substituted or unsubstituted aliphatic, substituted or unsubstituted heteroaliphatic, substituted or unsubstituted carbocyclylene, substituted or unsubstituted heterocyclylene, substituted or unsubstituted arylene, substituted or unsubstituted heteroarylene, —O—, —N(R^{A})—, —S—, —C(═O)—, —C(═O)O—, —C(═O)NR^{A}—, —NR^{A}C(═O)—, —NR^{A}C(═O)R^{A}—, —C(═O)R^{A}—, —NR^{A}C(═O)O—, —NR^{A}C(═O)N(R^{A})—, —OC(═O)—, —OC(═O)O—, —OC(═O)N(R^{A})—, —S(O)₂NR^{A}—, —NR^{A}S(O)₂—, or a combination thereof, wherein each R^{A} is independently hydrogen or substituted or unsubstituted alkyl. In some embodiments, L1 is

[chemical structure]

wherein L2 is

[chemical structure]

wherein a labels the site directly linked to the carbamate moiety of formulae (B), (D), (E), and (I); and b labels the site covalently linked (directly or via additional chemical moieties) to the oligonucleotide.

[0779] In some embodiments, L1 is:

[chemical structure]

wherein a labels the site directly linked to the carbamate moiety of formulae (B), (D), (E), and (I); and b labels the site covalently linked (directly or via additional chemical moieties) to the oligonucleotide.

[0780] In some embodiments, L1 is

[chemical structure]

[0781] In some embodiments, L1 is linked to a 5′ phosphate of the oligonucleotide. In some embodiments, L1 is linked to a 5′ phosphorothioate of the oligonucleotide. In some embodiments, L1 is linked to a 5′ phosphonoamidate of the oligonucleotide.

[0782] In some embodiments, L1 is linked to a 5′ phosphate of the oligonucleotide. In some embodiments, the linkage of L1 to a 5′ phosphate of the oligonucleotide forms a phosphodiester bond between L1 and the oligonucleotide.

[0783] In some embodiments, L1 is linked to a 3′ phosphate of the oligonucleotide. In some embodiments, the linkage of L1 to a 3′ phosphate of the oligonucleotide forms a phosphodiester bond between L1 and the oligonucleotide.

[0784] In some embodiments, L1 is optional (e.g., need not be present).

[0785] In some embodiments, any one of the complexes described herein has a structure of:

[chemical structure]

wherein n is 0-15 (e.g., 3) and m is 0-15 (e.g., 4). It should be understood that the amide shown adjacent the anti-TfR1 antibody in Formula (J) results from a reaction with an amine of the anti-TfR1 antibody, such as a lysine epsilon amine.

[0786] In some embodiments, any one of the complexes described herein has a structure of:

[chemical structure]

wherein n is 0-15 (e.g., 3) and m is 0-15 (e.g., 4).

[0787] In some embodiments, the oligonucleotide is modified to comprise an amine group at the 5′ end, the 3′ end, or internally (e.g., as an amine functionalized nucleobase), prior to linking to a compound, e.g., a compound of formula (A) or formula (G).

[0788] Although linker conjugation is described in the context of anti-TfR1 antibodies and oligonucleotide molecular payloads, it should be understood that use of such linker conjugation on other muscle-targeting agents, such as other muscle-targeting antibodies, and/or on other molecular payloads is contemplated.

[0789] D. Examples of Antibody-Molecular Payload Complexes

[0790] Other aspects of the present disclosure provide complexes comprising any one the muscle targeting agent (e.g., an anti-TfR1 antibodies) described herein covalently linked to any of the molecular payloads (e.g., an oligonucleotide) described herein. In some embodiments, the muscle targeting agent (e.g., an anti-TfR1 antibody) is covalently linked to a molecular payload (e.g., an oligonucleotide) via a linker. Any of the linkers described herein may be used. In some embodiments, the linker is linked to the 5′ end, the 3′ end, or internally of the oligonucleotide. In some embodiments, the linker is linked to the antibody via a thiol-reactive linkage (e.g., via a cysteine in the antibody). In some embodiments, the linker is linked to the antibody (e.g., an anti-TfR1 antibody described herein) via an amine group (e.g., via a lysine in the antibody).

[0791] An example of a structure of a complex comprising an anti-TfR1 antibody covalently linked to an oligonucleotide via a linker is provided below:

[chemical structure]

wherein the linker is linked to the 5′ end, the 3′ end, or internally of the oligonucleotide, and wherein the linker is linked to the antibody via a thiol-reactive linkage (e.g., via a cysteine in the antibody).

[0792] Another example of a structure of a complex comprising an anti-TfR1 antibody covalently linked to a molecular payload via a linker is provided below:

[chemical structure]

wherein n is a number between 0-10, wherein m is a number between 0-10, wherein the linker is linked to the antibody via an amine group (e.g., on a lysine residue), and/or (e.g., and) wherein the linker is linked to the oligonucleotide (e.g., at the 5′ end, 3′ end, or internally). In some embodiments, the linker is linked to the antibody via a lysine. In some embodiments, the oligonucleotide comprises a sense strand and an antisense strand, and the linker is linked to the sense strand or the antisense strand at the 5′ end or the 3′ end. In some embodiments, n is 3, and m is 4. In some embodiments, L1 is any one of the spacers described herein.

[0793] It should be appreciated that antibodies can be linked to oligonucleotides with different stoichiometries, a property that may be referred to as a drug to antibody ratios (DAR) with the “drug” being the oligonucleotide. In some embodiments, one oligonucleotide is linked to an antibody (DAR=1). In some embodiments, two oligonucleotides are linked to an antibody (DAR=2). In some embodiments, three oligonucleotides are linked to an antibody (DAR=3). In some embodiments, four oligonucleotides are linked to an antibody (DAR=4). In some embodiments, a mixture of different complexes, each having a different DAR, is provided. In some embodiments, an average DAR of complexes in such a mixture may be in a range of 1 to 3, 1 to 4, 1 to 5 or more. DAR may be increased by conjugating oligonucleotides to different sites on an antibody and/or (e.g., and) by conjugating multimers to one or more sites on antibody. For example, a DAR of 2 may be achieved by conjugating a single oligonucleotide to two different sites on an antibody or by conjugating a dimer oligonucleotide to a single site of an antibody.

[0794] In some embodiments, the complex described herein comprises an anti-TfR1 antibody (e.g., an antibody or any variant thereof as described herein) covalently linked to an oligonucleotide. In some embodiments, the complex described herein comprises an anti-TfR1 antibody (e.g., an antibody or any variant thereof as described herein) covalently linked to an oligonucleotide via a linker. In some embodiments, the linker is linked to the 5′ end, the 3′ end, or internally of the oligonucleotide. In some embodiments, the oligonucleotide is a siRNA and the linker is linked to the 5′ end, the 3′ end, or internally of the sense strand of the siRNA. In some embodiments, the oligonucleotide is a siRNA and the linker is linked to the 5′ end, the 3′ end, or internally of the antisense strand of the siRNA. In some embodiments, the linker is linked to the antibody (e.g., an antibody or any variant thereof as described herein) via a thiol-reactive linkage (e.g., via a cysteine in the antibody). In some embodiments, the linker is linked to the antibody (e.g., an anti-TfR1 antibody described herein) via an amine group (e.g., via a lysine in the antibody).

[0795] In some embodiments, in any one of the examples of complexes described herein, the molecular payload is an oligonucleotide comprising a region of complementarity of at least 15 nucleotides (e.g., at least 15, at least 16, at least 17, at least 18, at least 19 or more) nucleotides to any one of the gene target sequences described herein, optionally wherein the target sequence is a sequence listed in Tables 8, 11, and 14. In some embodiments, in any one of the examples of complexes described herein, the molecular payload is an oligonucleotide comprising a region of complementarity of at least 15 nucleotides (e.g., at least 15, at least 16, at least 17, at least 18, at least 19 or more) nucleotides to any one of the gene target sequences described herein, optionally wherein the target sequence is a sequence listed in Tables 17, 20, 23, 26, 29, 32, 35, and 38.

[0796] In some embodiments, the complex described herein comprises an anti-TfR1 antibody covalently linked to a molecular payload (e.g., an oligonucleotide), wherein the anti-TfR1 antibody comprises a CDR-H1, a CDR-H2, and a CDR-H3 that are the same as the CDR-H1, CDR-H2, and CDR-H3 shown in Table 2, Table 6, and Table 7; and a CDR-L1, a CDR-L2, and a CDR-L3 that are the same as the CDR-L1, CDR-L2, and CDR-L3 shown in Table 2, Table 6, and Table 7.

[0797] In some embodiments, the complex described herein comprises an anti-TfR1 antibody covalently linked to a molecular payload (e.g., an oligonucleotide), wherein the anti-TfR1 antibody comprises:

[0798] (i) a CDR-H1 of SEQ ID NO: 1, a CDR-H2 of SEQ ID NO: 2, SEQ ID NO: 19, or SEQ ID NO: 23, a CDR-H3 of SEQ ID NO: 3, a CDR-L1 of SEQ ID NO: 4, a CDR-L2 of SEQ ID NO: 5, and a CDR-L3 of SEQ ID NO: 6;

[0799] (ii) a CDR-H1 of SEQ ID NO: 7, a CDR-H2 of SEQ ID NO: 8, SEQ ID NO: 20, or SEQ ID NO: 24, a CDR-H3 of SEQ ID NO: 9, a CDR-L1 of SEQ ID NO: 10, a CDR-L2 of SEQ ID NO: 11, and a CDR-L3 of SEQ ID NO: 6; or

[0800] (iii) a CDR-H1 of SEQ ID NO: 12, a CDR-H2 of SEQ ID NO: 13, SEQ ID NO: 21, or SEQ ID NO: 25, a CDR-H3 of SEQ ID NO: 14, a CDR-L1 of SEQ ID NO: 15, a CDR-L2 of SEQ ID NO: 5, and a CDR-L3 of SEQ ID NO: 16. In some embodiments, the molecular payload is an MSTN targeting oligonucleotide comprising at least 16 nucleotides of a sequence listed in Table 9, optionally wherein the molecular payload is an MSTN targeting siRNA listed in Table 10. In some embodiments, the molecular payload is an INHBA targeting oligonucleotide comprising at least 16 nucleotides of a sequence listed in Table 12, optionally wherein the molecular payload is an INHBA targeting siRNA listed in Table 13. In some embodiments, the molecular payload is an ACVR1B targeting oligonucleotide comprising at least 16 nucleotides of a sequence listed in Table 15, optionally wherein the molecular payload is an ACVR1B targeting siRNA listed in Table 16. In some embodiments, the molecular payload is an oligonucleotide that is complementary to an MLCK1 mRNA molecule (e.g., the MLCK1 mRNA as set forth in SEQ ID NO: 411). In some embodiments, the molecular payload is an ACVR1 targeting oligonucleotide comprising at least 16 nucleotides of a sequence listed in Table 18, optionally wherein the molecular payload is an ACVR1 targeting siRNA listed in Table 19. In some embodiments, the molecular payload is a FBXO32 targeting oligonucleotide comprising at least 16 nucleotides of a sequence listed in Table 21, optionally wherein the molecular payload is a FBXO32 targeting siRNA listed in Table 22. In some embodiments, the molecular payload is a TRIM63 targeting oligonucleotide comprising at least 16 nucleotides of a sequence listed in Table 24, optionally wherein the molecular payload is a TRIM63 targeting siRNA listed in Table 25. In some embodiments, the molecular payload is a MEF2D targeting oligonucleotide comprising at least 16 nucleotides of a sequence listed in Table 27, optionally wherein the molecular payload is a MEF2D targeting siRNA listed in Table 28. In some embodiments, the molecular payload is a KLF15 targeting oligonucleotide comprising at least 16 nucleotides of a sequence listed in Table 30, optionally wherein the molecular payload is a KLF15 targeting siRNA listed in Table 31. In some embodiments, the molecular payload is a MED1 targeting oligonucleotide comprising at least 16 nucleotides of a sequence listed in Table 33, optionally wherein the molecular payload is a MED1 targeting siRNA listed in Table 34. In some embodiments, the molecular payload is a MED13 targeting oligonucleotide comprising at least 16 nucleotides of a sequence listed in Table 36, optionally wherein the molecular payload is a MED13 targeting siRNA listed in Table 37. In some embodiments, the molecular payload is a PPP1R3A targeting oligonucleotide comprising at least 16 nucleotides of a sequence listed in Table 39, optionally wherein the molecular payload is a PPP1R3A targeting siRNA listed in Table 40.

[0801] In some embodiments, the complex described herein comprises an anti-TfR1 antibody covalently linked to a molecular payload (e.g., an oligonucleotide), wherein the anti-TfR1 antibody comprises:

[0802] (i) a CDR-H1 of SEQ ID NO: 27, a CDR-H2 of SEQ ID NO: 28, a CDR-H3 of SEQ ID NO: 29, a CDR-L1 of SEQ ID NO: 30, a CDR-L2 of SEQ ID NO: 31, and a CDR-L3 of SEQ ID NO: 32;

[0803] (ii) a CDR-H1 of SEQ ID NO: 33, a CDR-H2 of SEQ ID NO: 34, a CDR-H3 of SEQ ID NO: 35, a CDR-L1 of SEQ ID NO: 36, a CDR-L2 of SEQ ID NO: 37, and a CDR-L3 of SEQ ID NO: 32; or

[0804] (iii) a CDR-H1 of SEQ ID NO: 38, a CDR-H2 of SEQ ID NO: 39, a CDR-H3 of SEQ ID NO: 40, a CDR-L1 of SEQ ID NO: 41, a CDR-L2 of SEQ ID NO: 31, and a CDR-L3 of SEQ ID NO: 42. In some embodiments, the molecular payload is an MSTN targeting oligonucleotide comprising at least 16 nucleotides of a sequence listed in Table 9, optionally wherein the molecular payload is an MSTN targeting siRNA listed in Table 10. In some embodiments, the molecular payload is an INHBA targeting oligonucleotide comprising at least 16 nucleotides of a sequence listed in Table 12, optionally wherein the molecular payload is an INHBA targeting siRNA listed in Table 13. In some embodiments, the molecular payload is an ACVR1B targeting oligonucleotide comprising at least 16 nucleotides of a sequence listed in Table 15, optionally wherein the molecular payload is an ACVR1B targeting siRNA listed in Table 16. In some embodiments, the molecular payload is an oligonucleotide that is complementary to an MLCK1 mRNA molecule (e.g., the MLCK1 mRNA as set forth in SEQ ID NO: 411). In some embodiments, the molecular payload is an ACVR1 targeting oligonucleotide comprising at least 16 nucleotides of a sequence listed in Table 18, optionally wherein the molecular payload is an ACVR1 targeting siRNA listed in Table 19. In some embodiments, the molecular payload is a FBXO32 targeting oligonucleotide comprising at least 16 nucleotides of a sequence listed in Table 21, optionally wherein the molecular payload is a FBXO32 targeting siRNA listed in Table 22. In some embodiments, the molecular payload is a TRIM63 targeting oligonucleotide comprising at least 16 nucleotides of a sequence listed in Table 24, optionally wherein the molecular payload is a TRIM63 targeting siRNA listed in Table 25. In some embodiments, the molecular payload is a MEF2D targeting oligonucleotide comprising at least 16 nucleotides of a sequence listed in Table 27, optionally wherein the molecular payload is a MEF2D targeting siRNA listed in Table 28. In some embodiments, the molecular payload is a KLF15 targeting oligonucleotide comprising at least 16 nucleotides of a sequence listed in Table 30, optionally wherein the molecular payload is a KLF15 targeting siRNA listed in Table 31. In some embodiments, the molecular payload is a MED1 targeting oligonucleotide comprising at least 16 nucleotides of a sequence listed in Table 33, optionally wherein the molecular payload is a MED1 targeting siRNA listed in Table 34. In some embodiments, the molecular payload is a MED13 targeting oligonucleotide comprising at least 16 nucleotides of a sequence listed in Table 36, optionally wherein the molecular payload is a MED13 targeting siRNA listed in Table 37. In some embodiments, the molecular payload is a PPP1R3A targeting oligonucleotide comprising at least 16 nucleotides of a sequence listed in Table 39, optionally wherein the molecular payload is a PPP1R3A targeting siRNA listed in Table 40.

[0805] In some embodiments, the complex described herein comprises an anti-TfR1 antibody covalently linked to a molecular payload (e.g., an oligonucleotide), wherein the anti-TfR1 antibody comprises:

[0806] (i) a CDR-H1 of SEQ ID NO: 45, SEQ ID NO: 63, or SEQ ID NO: 66, a CDR-H2 of SEQ ID NO: 46, a CDR-H3 of SEQ ID NO: 47, a CDR-L1 of SEQ ID NO: 48, a CDR-L2 of SEQ ID NO: 49, and a CDR-L3 of SEQ ID NO: 50;

[0807] (ii) a CDR-H1 of SEQ ID NO: 51, SEQ ID NO: 64, or SEQ ID NO: 67, a CDR-H2 of SEQ ID NO: 52, a CDR-H3 of SEQ ID NO: 53, a CDR-L1 of SEQ ID NO: 54, a CDR-L2 of SEQ ID NO: 55, and a CDR-L3 of SEQ ID NO: 50; or

[0808] (iii) a CDR-H1 of SEQ ID NO: 56, a CDR-H2 of SEQ ID NO: 57, a CDR-H3 of SEQ ID NO: 58, a CDR-L1 of SEQ ID NO: 59, a CDR-L2 of SEQ ID NO: 49, and a CDR-L3 of SEQ ID NO: 60. In some embodiments, the molecular payload is an MSTN targeting oligonucleotide comprising at least 16 nucleotides of a sequence listed in Table 9, optionally wherein the molecular payload is an MSTN targeting siRNA listed in Table 10. In some embodiments, the molecular payload is an INHBA targeting oligonucleotide comprising at least 16 nucleotides of a sequence listed in Table 12, optionally wherein the molecular payload is an INHBA targeting siRNA listed in Table 13. In some embodiments, the molecular payload is an ACVR1B targeting oligonucleotide comprising at least 16 nucleotides of a sequence listed in Table 15, optionally wherein the molecular payload is an ACVR1B targeting siRNA listed in Table 16. In some embodiments, the molecular payload is an oligonucleotide that is complementary to an MLCK1 mRNA molecule (e.g., the MLCK1 mRNA as set forth in SEQ ID NO: 411). In some embodiments, the molecular payload is an ACVR1 targeting oligonucleotide comprising at least 16 nucleotides of a sequence listed in Table 18, optionally wherein the molecular payload is an ACVR1 targeting siRNA listed in Table 19. In some embodiments, the molecular payload is a FBXO32 targeting oligonucleotide comprising at least 16 nucleotides of a sequence listed in Table 21, optionally wherein the molecular payload is a FBXO32 targeting siRNA listed in Table 22. In some embodiments, the molecular payload is a TRIM63 targeting oligonucleotide comprising at least 16 nucleotides of a sequence listed in Table 24, optionally wherein the molecular payload is a TRIM63 targeting siRNA listed in Table 25. In some embodiments, the molecular payload is a MEF2D targeting oligonucleotide comprising at least 16 nucleotides of a sequence listed in Table 27, optionally wherein the molecular payload is a MEF2D targeting siRNA listed in Table 28. In some embodiments, the molecular payload is a KLF15 targeting oligonucleotide comprising at least 16 nucleotides of a sequence listed in Table 30, optionally wherein the molecular payload is a KLF15 targeting siRNA listed in Table 31. In some embodiments, the molecular payload is a MED1 targeting oligonucleotide comprising at least 16 nucleotides of a sequence listed in Table 33, optionally wherein the molecular payload is a MED1 targeting siRNA listed in Table 34. In some embodiments, the molecular payload is a MED13 targeting oligonucleotide comprising at least 16 nucleotides of a sequence listed in Table 36, optionally wherein the molecular payload is a MED13 targeting siRNA listed in Table 37. In some embodiments, the molecular payload is a PPP1R3A targeting oligonucleotide comprising at least 16 nucleotides of a sequence listed in Table 39, optionally wherein the molecular payload is a PPP1R3A targeting siRNA listed in Table 40.

[0809] In some embodiments, the complex described herein comprises an anti-TfR1 antibody covalently linked to a molecular payload (e.g., an oligonucleotide), wherein the anti-TfR1 antibody comprises:

[0810] (i) a CDR-H1 of SEQ ID NO: 110, a CDR-H2 of SEQ ID NO: 111, a CDR-H3 of SEQ ID NO: 112, a CDR-L1 of SEQ ID NO: 113, a CDR-L2 of SEQ ID NO: 114, and a CDR-L3 of SEQ ID NO: 115;

[0811] (ii) a CDR-H1 of SEQ ID NO: 116, a CDR-H2 of SEQ ID NO: 117, a CDR-H3 of SEQ ID NO: 112, a CDR-L1 of SEQ ID NO: 113, a CDR-L2 of SEQ ID NO: 114, and a CDR-L3 of SEQ ID NO: 115; or

[0812] (iii) a CDR-H1 of SEQ ID NO: 118, a CDR-H2 of SEQ ID NO: 119, a CDR-H3 of SEQ ID NO: 120, a CDR-L1 of SEQ ID NO: 121, a CDR-L2 of SEQ ID NO: 122, and a CDR-L3 of SEQ ID NO: 123. In some embodiments, the molecular payload is an MSTN targeting oligonucleotide comprising at least 16 nucleotides of a sequence listed in Table 9, optionally wherein the molecular payload is an MSTN targeting siRNA listed in Table 10. In some embodiments, the molecular payload is an INHBA targeting oligonucleotide comprising at least 16 nucleotides of a sequence listed in Table 12, optionally wherein the molecular payload is an INHBA targeting siRNA listed in Table 13. In some embodiments, the molecular payload is an ACVR1B targeting oligonucleotide comprising at least 16 nucleotides of a sequence listed in Table 15, optionally wherein the molecular payload is an ACVR1B targeting siRNA listed in Table 16. In some embodiments, the molecular payload is an oligonucleotide that is complementary to an MLCK1 mRNA molecule (e.g., the MLCK1 mRNA as set forth in SEQ ID NO: 152). In some embodiments, the molecular payload is an ACVR1 targeting oligonucleotide comprising at least 16 nucleotides of a sequence listed in Table 18, optionally wherein the molecular payload is an ACVR1 targeting siRNA listed in Table 19. In some embodiments, the molecular payload is a FBXO32 targeting oligonucleotide comprising at least 16 nucleotides of a sequence listed in Table 21, optionally wherein the molecular payload is a FBXO32 targeting siRNA listed in Table 22. In some embodiments, the molecular payload is a TRIM63 targeting oligonucleotide comprising at least 16 nucleotides of a sequence listed in Table 24, optionally wherein the molecular payload is a TRIM63 targeting siRNA listed in Table 25. In some embodiments, the molecular payload is a MEF2D targeting oligonucleotide comprising at least 16 nucleotides of a sequence listed in Table 27, optionally wherein the molecular payload is a MEF2D targeting siRNA listed in Table 28. In some embodiments, the molecular payload is a KLF15 targeting oligonucleotide comprising at least 16 nucleotides of a sequence listed in Table 30, optionally wherein the molecular payload is a KLF15 targeting siRNA listed in Table 31. In some embodiments, the molecular payload is a MED1 targeting oligonucleotide comprising at least 16 nucleotides of a sequence listed in Table 33, optionally wherein the molecular payload is a MED1 targeting siRNA listed in Table 34. In some embodiments, the molecular payload is a MED13 targeting oligonucleotide comprising at least 16 nucleotides of a sequence listed in Table 36, optionally wherein the molecular payload is a MED13 targeting siRNA listed in Table 37. In some embodiments, the molecular payload is a PPP1R3A targeting oligonucleotide comprising at least 16 nucleotides of a sequence listed in Table 39, optionally wherein the molecular payload is a PPP1R3A targeting siRNA listed in Table 40.

[0813] In some embodiments, the complex described herein comprises an anti-TfR1 antibody covalently linked to a molecular payload (e.g., an oligonucleotide), wherein the anti-TfR1 antibody comprises VH as shown in Table 2 or Table 3; and a VL as shown in Table 2 or Table 3. In some embodiments, the molecular payload is an MSTN targeting oligonucleotide comprising at least 16 nucleotides of a sequence listed in Table 9, optionally wherein the molecular payload is an MSTN targeting siRNA listed in Table 10. In some embodiments, the molecular payload is an INHBA targeting oligonucleotide comprising at least 16 nucleotides of a sequence listed in Table 12, optionally wherein the molecular payload is an INHBA targeting siRNA listed in Table 13. In some embodiments, the molecular payload is an ACVR1B targeting oligonucleotide comprising at least 16 nucleotides of a sequence listed in Table 15, optionally wherein the molecular payload is an ACVR1B targeting siRNA listed in Table 16. In some embodiments, the molecular payload is an oligonucleotide that is complementary to an MLCK1 mRNA molecule (e.g., the MLCK1 mRNA as set forth in SEQ ID NO: 152). In some embodiments, the molecular payload is an ACVR1 targeting oligonucleotide comprising at least 16 nucleotides of a sequence listed in Table 18, optionally wherein the molecular payload is an ACVR1 targeting siRNA listed in Table 19. In some embodiments, the molecular payload is a FBXO32 targeting oligonucleotide comprising at least 16 nucleotides of a sequence listed in Table 21, optionally wherein the molecular payload is a FBXO32 targeting siRNA listed in Table 22. In some embodiments, the molecular payload is a TRIM63 targeting oligonucleotide comprising at least 16 nucleotides of a sequence listed in Table 24, optionally wherein the molecular payload is a TRIM63 targeting siRNA listed in Table 25. In some embodiments, the molecular payload is a MEF2D targeting oligonucleotide comprising at least 16 nucleotides of a sequence listed in Table 27, optionally wherein the molecular payload is a MEF2D targeting siRNA listed in Table 28. In some embodiments, the molecular payload is a KLF15 targeting oligonucleotide comprising at least 16 nucleotides of a sequence listed in Table 30, optionally wherein the molecular payload is a KLF15 targeting siRNA listed in Table 31. In some embodiments, the molecular payload is a MED1 targeting oligonucleotide comprising at least 16 nucleotides of a sequence listed in Table 33, optionally wherein the molecular payload is a MED1 targeting siRNA listed in Table 34. In some embodiments, the molecular payload is a MED13 targeting oligonucleotide comprising at least 16 nucleotides of a sequence listed in Table 36, optionally wherein the molecular payload is a MED13 targeting siRNA listed in Table 37. In some embodiments, the molecular payload is a PPP1R3A targeting oligonucleotide comprising at least 16 nucleotides of a sequence listed in Table 39, optionally wherein the molecular payload is a PPP1R3A targeting siRNA listed in Table 40.

[0814] In some embodiments, the complex described herein comprises an anti-TfR1 antibody covalently linked to a molecular payload (e.g., an oligonucleotide), wherein the anti-TfR1 antibody comprises a heavy chain and light chain of any one of the antibodies listed in Tables 4 and 5. In some embodiments, the molecular payload is an MSTN targeting oligonucleotide comprising at least 16 nucleotides of a sequence listed in Table 9, optionally wherein the molecular payload is an MSTN targeting siRNA listed in Table 10. In some embodiments, the molecular payload is an INHBA targeting oligonucleotide comprising at least 16 nucleotides of a sequence listed in Table 12, optionally wherein the molecular payload is an INHBA targeting siRNA listed in Table 13. In some embodiments, the molecular payload is an ACVR1B targeting oligonucleotide comprising at least 16 nucleotides of a sequence listed in Table 15, optionally wherein the molecular payload is an ACVR1B targeting siRNA listed in Table 16. In some embodiments, the molecular payload is an oligonucleotide that is complementary to an MLCK1 mRNA molecule (e.g., the MLCK1 mRNA as set forth in SEQ ID NO: 152). In some embodiments, the molecular payload is an ACVR1 targeting oligonucleotide comprising at least 16 nucleotides of a sequence listed in Table 18, optionally wherein the molecular payload is an ACVR1 targeting siRNA listed in Table 19. In some embodiments, the molecular payload is a FBXO32 targeting oligonucleotide comprising at least 16 nucleotides of a sequence listed in Table 21, optionally wherein the molecular payload is a FBXO32 targeting siRNA listed in Table 22. In some embodiments, the molecular payload is a TRIM63 targeting oligonucleotide comprising at least 16 nucleotides of a sequence listed in Table 24, optionally wherein the molecular payload is a TRIM63 targeting siRNA listed in Table 25. In some embodiments, the molecular payload is a MEF2D targeting oligonucleotide comprising at least 16 nucleotides of a sequence listed in Table 27, optionally wherein the molecular payload is a MEF2D targeting siRNA listed in Table 28. In some embodiments, the molecular payload is a KLF15 targeting oligonucleotide comprising at least 16 nucleotides of a sequence listed in Table 30, optionally wherein the molecular payload is a KLF15 targeting siRNA listed in Table 31. In some embodiments, the molecular payload is a MED1 targeting oligonucleotide comprising at least 16 nucleotides of a sequence listed in Table 33, optionally wherein the molecular payload is a MED1 targeting siRNA listed in Table 34. In some embodiments, the molecular payload is a MED13 targeting oligonucleotide comprising at least 16 nucleotides of a sequence listed in Table 36, optionally wherein the molecular payload is a MED13 targeting siRNA listed in Table 37. In some embodiments, the molecular payload is a PPP1R3A targeting oligonucleotide comprising at least 16 nucleotides of a sequence listed in Table 39, optionally wherein the molecular payload is a PPP1R3A targeting siRNA listed in Table 40.

[0815] In some embodiments, the complex described herein comprises an anti-TfR1 antibody covalently linked to a molecular payload (e.g., an oligonucleotide), wherein the anti-TfR1 antibody comprises a VH having the amino acid sequence of SEQ ID NO: 124 and a VL having the amino acid sequence of SEQ ID NO: 125. In some embodiments, the molecular payload is an MSTN targeting oligonucleotide comprising at least 16 nucleotides of a sequence listed in Table 9, optionally wherein the molecular payload is an MSTN targeting siRNA listed in Table 10. In some embodiments, the molecular payload is an INHBA targeting oligonucleotide comprising at least 16 nucleotides of a sequence listed in Table 12, optionally wherein the molecular payload is an INHBA targeting siRNA listed in Table 13. In some embodiments, the molecular payload is an ACVR1B targeting oligonucleotide comprising at least 16 nucleotides of a sequence listed in Table 15, optionally wherein the molecular payload is an ACVR1B targeting siRNA listed in Table 16. In some embodiments, the molecular payload is an oligonucleotide that is complementary to an MLCK1 mRNA molecule (e.g., the MLCK1 mRNA as set forth in SEQ ID NO: 152). In some embodiments, the molecular payload is an ACVR1 targeting oligonucleotide comprising at least 16 nucleotides of a sequence listed in Table 18, optionally wherein the molecular payload is an ACVR1 targeting siRNA listed in Table 19. In some embodiments, the molecular payload is a FBXO32 targeting oligonucleotide comprising at least 16 nucleotides of a sequence listed in Table 21, optionally wherein the molecular payload is a FBXO32 targeting siRNA listed in Table 22. In some embodiments, the molecular payload is a TRIM63 targeting oligonucleotide comprising at least 16 nucleotides of a sequence listed in Table 24, optionally wherein the molecular payload is a TRIM63 targeting siRNA listed in Table 25. In some embodiments, the molecular payload is a MEF2D targeting oligonucleotide comprising at least 16 nucleotides of a sequence listed in Table 27, optionally wherein the molecular payload is a MEF2D targeting siRNA listed in Table 28. In some embodiments, the molecular payload is a KLF15 targeting oligonucleotide comprising at least 16 nucleotides of a sequence listed in Table 30, optionally wherein the molecular payload is a KLF15 targeting siRNA listed in Table 31. In some embodiments, the molecular payload is a MED1 targeting oligonucleotide comprising at least 16 nucleotides of a sequence listed in Table 33, optionally wherein the molecular payload is a MED1 targeting siRNA listed in Table 34. In some embodiments, the molecular payload is a MED13 targeting oligonucleotide comprising at least 16 nucleotides of a sequence listed in Table 36, optionally wherein the molecular payload is a MED13 targeting siRNA listed in Table 37. In some embodiments, the molecular payload is a PPP1R3A targeting oligonucleotide comprising at least 16 nucleotides of a sequence listed in Table 39, optionally wherein the molecular payload is a PPP1R3A targeting siRNA listed in Table 40.

[0816] In some embodiments, the complex described herein comprises an anti-TfR1 antibody covalently linked to a molecular payload (e.g., an oligonucleotide), wherein the anti-TfR1 antibody comprises a heavy chain having the amino acid sequence of any one of SEQ ID NOs: 132, 133, 136, and 137, and a light chain having the amino acid sequence of SEQ ID No: 133 or SEQ ID NO: 135. In some embodiments, the molecular payload is an MSTN targeting oligonucleotide comprising at least 16 nucleotides of a sequence listed in Table 9, optionally wherein the molecular payload is an MSTN targeting siRNA listed in Table 10. In some embodiments, the molecular payload is an INHBA targeting oligonucleotide comprising at least 16 nucleotides of a sequence listed in Table 12, optionally wherein the molecular payload is an INHBA targeting siRNA listed in Table 13. In some embodiments, the molecular payload is an ACVR1B targeting oligonucleotide comprising at least 16 nucleotides of a sequence listed in Table 15, optionally wherein the molecular payload is an ACVR1B targeting siRNA listed in Table 16. In some embodiments, the molecular payload is an oligonucleotide that is complementary to an MLCK1 mRNA molecule (e.g., the MLCK1 mRNA as set forth in SEQ ID NO: 152). In some embodiments, the molecular payload is an ACVR1 targeting oligonucleotide comprising at least 16 nucleotides of a sequence listed in Table 18, optionally wherein the molecular payload is an ACVR1 targeting siRNA listed in Table 19. In some embodiments, the molecular payload is a FBXO32 targeting oligonucleotide comprising at least 16 nucleotides of a sequence listed in Table 21, optionally wherein the molecular payload is a FBXO32 targeting siRNA listed in Table 22. In some embodiments, the molecular payload is a TRIM63 targeting oligonucleotide comprising at least 16 nucleotides of a sequence listed in Table 24, optionally wherein the molecular payload is a TRIM63 targeting siRNA listed in Table 25. In some embodiments, the molecular payload is a MEF2D targeting oligonucleotide comprising at least 16 nucleotides of a sequence listed in Table 27, optionally wherein the molecular payload is a MEF2D targeting siRNA listed in Table 28. In some embodiments, the molecular payload is a KLF15 targeting oligonucleotide comprising at least 16 nucleotides of a sequence listed in Table 30, optionally wherein the molecular payload is a KLF15 targeting siRNA listed in Table 31. In some embodiments, the molecular payload is a MED1 targeting oligonucleotide comprising at least 16 nucleotides of a sequence listed in Table 33, optionally wherein the molecular payload is a MED1 targeting siRNA listed in Table 34. In some embodiments, the molecular payload is a MED13 targeting oligonucleotide comprising at least 16 nucleotides of a sequence listed in Table 36, optionally wherein the molecular payload is a MED13 targeting siRNA listed in Table 37. In some embodiments, the molecular payload is a PPP1R3A targeting oligonucleotide comprising at least 16 nucleotides of a sequence listed in Table 39, optionally wherein the molecular payload is a PPP1R3A targeting siRNA listed in Table 40.

[0817] In some embodiments, the complex described herein comprises an anti-TfR1 antibody covalently linked via a lysine to the 5′ end of an oligonucleotide, wherein the antibody is a Fab fragment of an IgG1 kappa that comprises human framework regions with the CDRs of a murine antibody listed in Table 2 (e.g., 3A4, 3M12, or 5H12), wherein the complex has the structure of:

[chemical structure]

wherein n is 3 and m is 4. In some embodiments, the molecular payload is an MSTN targeting oligonucleotide comprising at least 16 nucleotides of a sequence listed in Table 9, optionally wherein the molecular payload is an MSTN targeting siRNA listed in Table 10. In some embodiments, the molecular payload is an INHBA targeting oligonucleotide comprising at least 16 nucleotides of a sequence listed in Table 12, optionally wherein the molecular payload is an INHBA targeting siRNA listed in Table 13. In some embodiments, the molecular payload is an ACVR1B targeting oligonucleotide comprising at least 16 nucleotides of a sequence listed in Table 15, optionally wherein the molecular payload is an ACVR1B targeting siRNA listed in Table 16. In some embodiments, the molecular payload is an oligonucleotide that is complementary to an MLCK1 mRNA molecule (e.g., the MLCK1 mRNA as set forth in SEQ ID NO: 152). In some embodiments, the molecular payload is an ACVR1 targeting oligonucleotide comprising at least 16 nucleotides of a sequence listed in Table 18, optionally wherein the molecular payload is an ACVR1 targeting siRNA listed in Table 19. In some embodiments, the molecular payload is a FBXO32 targeting oligonucleotide comprising at least 16 nucleotides of a sequence listed in Table 21, optionally wherein the molecular payload is a FBXO32 targeting siRNA listed in Table 22. In some embodiments, the molecular payload is a TRIM63 targeting oligonucleotide comprising at least 16 nucleotides of a sequence listed in Table 24, optionally wherein the molecular payload is a TRIM63 targeting siRNA listed in Table 25. In some embodiments, the molecular payload is a MEF2D targeting oligonucleotide comprising at least 16 nucleotides of a sequence listed in Table 27, optionally wherein the molecular payload is a MEF2D targeting siRNA listed in Table 28. In some embodiments, the molecular payload is a KLF15 targeting oligonucleotide comprising at least 16 nucleotides of a sequence listed in Table 30, optionally wherein the molecular payload is a KLF15 targeting siRNA listed in Table 31. In some embodiments, the molecular payload is a MED1 targeting oligonucleotide comprising at least 16 nucleotides of a sequence listed in Table 33, optionally wherein the molecular payload is a MED1 targeting siRNA listed in Table 34. In some embodiments, the molecular payload is a MED13 targeting oligonucleotide comprising at least 16 nucleotides of a sequence listed in Table 36, optionally wherein the molecular payload is a MED13 targeting siRNA listed in Table 37. In some embodiments, the molecular payload is a PPP1R3A targeting oligonucleotide comprising at least 16 nucleotides of a sequence listed in Table 39, optionally wherein the molecular payload is a PPP1R3A targeting siRNA listed in Table 40.

[0818] In some embodiments, the complex described herein comprises an anti-TfR1 Fab covalently linked via a lysine to an oligonucleotide (e.g., an oligonucleotide targeting MSTN, INHBA, ACVR1B, MLCK1, ACVR1, FBXO32, TRIM63, MEF2D, KLF15, MED1, MED13, or PPP1R3A), wherein the anti-TfR1 Fab comprises a CDR-H1, a CDR-H2, a CDR-H3, a CDR-L1, a CDR-L2, and a CDR-L3 of any one of the antibodies listed in Table 2, Table 6, and Table 7; wherein the complex has the structure of:

[chemical structure]

wherein n is 3 and m is 4. In some embodiments, the molecular payload is an MSTN targeting oligonucleotide comprising at least 16 nucleotides of a sequence listed in Table 9, optionally wherein the molecular payload is an MSTN targeting siRNA listed in Table 10. In some embodiments, the molecular payload is an INHBA targeting oligonucleotide comprising at least 16 nucleotides of a sequence listed in Table 12, optionally wherein the molecular payload is an INHBA targeting siRNA listed in Table 13. In some embodiments, the molecular payload is an ACVR1B targeting oligonucleotide comprising at least 16 nucleotides of a sequence listed in Table 15, optionally wherein the molecular payload is an ACVR1B targeting siRNA listed in Table 16. In some embodiments, the oligonucleotide in the complex is an siRNA with complementarity to an MLCK1 mRNA molecule which is linked at the 5′ end or 3′ end of the sense strand or the antisense strand. In some embodiments, the molecular payload is an ACVR1 targeting oligonucleotide comprising at least 16 nucleotides of a sequence listed in Table 18, optionally wherein the molecular payload is an ACVR1 targeting siRNA listed in Table 19. In some embodiments, the molecular payload is a FBXO32 targeting oligonucleotide comprising at least 16 nucleotides of a sequence listed in Table 21, optionally wherein the molecular payload is a FBXO32 targeting siRNA listed in Table 22. In some embodiments, the molecular payload is a TRIM63 targeting oligonucleotide comprising at least 16 nucleotides of a sequence listed in Table 24, optionally wherein the molecular payload is a TRIM63 targeting siRNA listed in Table 25. In some embodiments, the molecular payload is a MEF2D targeting oligonucleotide comprising at least 16 nucleotides of a sequence listed in Table 27, optionally wherein the molecular payload is a MEF2D targeting siRNA listed in Table 28. In some embodiments, the molecular payload is a KLF15 targeting oligonucleotide comprising at least 16 nucleotides of a sequence listed in Table 30, optionally wherein the molecular payload is a KLF15 targeting siRNA listed in Table 31. In some embodiments, the molecular payload is a MED1 targeting oligonucleotide comprising at least 16 nucleotides of a sequence listed in Table 33, optionally wherein the molecular payload is a MED1 targeting siRNA listed in Table 34. In some embodiments, the molecular payload is a MED13 targeting oligonucleotide comprising at least 16 nucleotides of a sequence listed in Table 36, optionally wherein the molecular payload is a MED13 targeting siRNA listed in Table 37. In some embodiments, the molecular payload is a PPP1R3A targeting oligonucleotide comprising at least 16 nucleotides of a sequence listed in Table 39, optionally wherein the molecular payload is a PPP1R3A targeting siRNA listed in Table 40. In some embodiments, the oligonucleotide in the complex is an siRNA listed in Table 10, Table 13, Table 16, Table 19, Table 22, Table 25, Table 28, Table 31, Table 34, Table 37, or Table 40 which is linked at the 5′ end or 3′ end of the sense strand or the antisense strand.

[0819] In some embodiments, the complex described herein comprises an anti-TfR1 Fab covalently linked via a lysine to an oligonucleotide (e.g., an oligonucleotide targeting MSTN, INHBA, ACVR1B, MLCK1, ACVR1, FBXO32, TRIM63, MEF2D, KLF15, MED1, MED13, or PPP1R3A), wherein the anti-TfR1 Fab comprises a VH and VL of any one of the antibodies listed in Table 2 or Table 3; wherein the complex has the structure of:

[chemical structure]

wherein n is 3 and m is 4. In some embodiments, the molecular payload is an MSTN targeting oligonucleotide comprising at least 16 nucleotides of a sequence listed in Table 9, optionally wherein the molecular payload is an MSTN targeting siRNA listed in Table 10. In some embodiments, the molecular payload is an INHBA targeting oligonucleotide comprising at least 16 nucleotides of a sequence listed in Table 12, optionally wherein the molecular payload is an INHBA targeting siRNA listed in Table 13. In some embodiments, the molecular payload is an ACVR1B targeting oligonucleotide comprising at least 16 nucleotides of a sequence listed in Table 15, optionally wherein the molecular payload is an ACVR1B targeting siRNA listed in Table 16. In some embodiments, the oligonucleotide in the complex is an siRNA with complementarity to an MLCK1 mRNA molecule which is linked at the 5′ end or 3′ end of the sense strand or the antisense strand. In some embodiments, the molecular payload is an ACVR1 targeting oligonucleotide comprising at least 16 nucleotides of a sequence listed in Table 18, optionally wherein the molecular payload is an ACVR1 targeting siRNA listed in Table 19. In some embodiments, the molecular payload is a FBXO32 targeting oligonucleotide comprising at least 16 nucleotides of a sequence listed in Table 21, optionally wherein the molecular payload is a FBXO32 targeting siRNA listed in Table 22. In some embodiments, the molecular payload is a TRIM63 targeting oligonucleotide comprising at least 16 nucleotides of a sequence listed in Table 24, optionally wherein the molecular payload is a TRIM63 targeting siRNA listed in Table 25. In some embodiments, the molecular payload is a MEF2D targeting oligonucleotide comprising at least 16 nucleotides of a sequence listed in Table 27, optionally wherein the molecular payload is a MEF2D targeting siRNA listed in Table 28. In some embodiments, the molecular payload is a KLF15 targeting oligonucleotide comprising at least 16 nucleotides of a sequence listed in Table 30, optionally wherein the molecular payload is a KLF15 targeting siRNA listed in Table 31. In some embodiments, the molecular payload is a MED1 targeting oligonucleotide comprising at least 16 nucleotides of a sequence listed in Table 33, optionally wherein the molecular payload is a MED1 targeting siRNA listed in Table 34. In some embodiments, the molecular payload is a MED13 targeting oligonucleotide comprising at least 16 nucleotides of a sequence listed in Table 36, optionally wherein the molecular payload is a MED13 targeting siRNA listed in Table 37. In some embodiments, the molecular payload is a PPP1R3A targeting oligonucleotide comprising at least 16 nucleotides of a sequence listed in Table 39, optionally wherein the molecular payload is a PPP1R3A targeting siRNA listed in Table 40. In some embodiments, the oligonucleotide in the complex is an siRNA listed in Table 10, Table 13, Table 16, Table 19, Table 22, Table 25, Table 28, Table 31, Table 34, Table 37, or Table 40 which is linked at the 5′ end or 3′ end of the sense strand or the antisense strand.

[0820] In some embodiments, the complex described herein comprises an anti-TfR1 Fab covalently linked via a lysine to an oligonucleotide (e.g., an oligonucleotide targeting MSTN, INHBA, ACVR1B, MLCK1, ACVR1, FBXO32, TRIM63, MEF2D, KLF15, MED1, MED13, PPP1R3A), wherein the anti-TfR1 Fab comprises a VH comprising the amino acid sequence of SEQ ID NO: 76 and a VL comprising the amino acid sequence of SEQ ID NO: 75; wherein the complex has the structure of:

[chemical structure]

wherein n is 3 and m is 4. In some embodiments, the molecular payload is an MSTN targeting oligonucleotide comprising at least 16 nucleotides of a sequence listed in Table 9, optionally wherein the molecular payload is an MSTN targeting siRNA listed in Table 10. In some embodiments, the molecular payload is an INHBA targeting oligonucleotide comprising at least 16 nucleotides of a sequence listed in Table 12, optionally wherein the molecular payload is an INHBA targeting siRNA listed in Table 13. In some embodiments, the molecular payload is an ACVR1B targeting oligonucleotide comprising at least 16 nucleotides of a sequence listed in Table 15, optionally wherein the molecular payload is an ACVR1B targeting siRNA listed in Table 16. In some embodiments, the oligonucleotide in the complex is an siRNA with complementarity to an MLCK1 mRNA molecule which is linked at the 5′ end or 3′ end of the sense strand or the antisense strand. In some embodiments, the molecular payload is an ACVR1 targeting oligonucleotide comprising at least 16 nucleotides of a sequence listed in Table 18, optionally wherein the molecular payload is an ACVR1 targeting siRNA listed in Table 19. In some embodiments, the molecular payload is a FBXO32 targeting oligonucleotide comprising at least 16 nucleotides of a sequence listed in Table 21, optionally wherein the molecular payload is a FBXO32 targeting siRNA listed in Table 22. In some embodiments, the molecular payload is a TRIM63 targeting oligonucleotide comprising at least 16 nucleotides of a sequence listed in Table 24, optionally wherein the molecular payload is a TRIM63 targeting siRNA listed in Table 25. In some embodiments, the molecular payload is a MEF2D targeting oligonucleotide comprising at least 16 nucleotides of a sequence listed in Table 27, optionally wherein the molecular payload is a MEF2D targeting siRNA listed in Table 28. In some embodiments, the molecular payload is a KLF15 targeting oligonucleotide comprising at least 16 nucleotides of a sequence listed in Table 30, optionally wherein the molecular payload is a KLF15 targeting siRNA listed in Table 31. In some embodiments, the molecular payload is a MED1 targeting oligonucleotide comprising at least 16 nucleotides of a sequence listed in Table 33, optionally wherein the molecular payload is a MED1 targeting siRNA listed in Table 34. In some embodiments, the molecular payload is a MED13 targeting oligonucleotide comprising at least 16 nucleotides of a sequence listed in Table 36, optionally wherein the molecular payload is a MED13 targeting siRNA listed in Table 37. In some embodiments, the molecular payload is a PPP1R3A targeting oligonucleotide comprising at least 16 nucleotides of a sequence listed in Table 39, optionally wherein the molecular payload is a PPP1R3A targeting siRNA listed in Table 40. In some embodiments, the oligonucleotide in the complex is an siRNA listed in Table 10, Table 13, Table 16, Table 19, Table 22, Table 25, Table 28, Table 31, Table 34, Table 37, or Table 40 which is linked at the 5′ end or 3′ end of the sense strand or the antisense strand.

[0821] In some embodiments, the complex described herein comprises an anti-TfR1 Fab covalently linked via a lysine to an oligonucleotide (e.g., an oligonucleotide targeting MSTN, INHBA, ACVR1B, MLCK1, ACVR1, FBXO32, TRIM63, MEF2D, KLF15, MED1, MED13, or PPP1R3A), wherein the anti-TfR1 Fab comprises a heavy chain and light chain of any one of the antibodies listed in Table 5; wherein the complex has the structure of:

[chemical structure]

wherein n is 3 and m is 4. In some embodiments, the molecular payload is an MSTN targeting oligonucleotide comprising at least 16 nucleotides of a sequence listed in Table 9, optionally wherein the molecular payload is an MSTN targeting siRNA listed in Table 10. In some embodiments, the molecular payload is an INHBA targeting oligonucleotide comprising at least 16 nucleotides of a sequence listed in Table 12, optionally wherein the molecular payload is an INHBA targeting siRNA listed in Table 13. In some embodiments, the molecular payload is an ACVR1B targeting oligonucleotide comprising at least 16 nucleotides of a sequence listed in Table 15, optionally wherein the molecular payload is an ACVR1B targeting siRNA listed in Table 16. In some embodiments, the oligonucleotide in the complex is an siRNA with complementarity to an MLCK1 mRNA molecule which is linked at the 5′ end or 3′ end of the sense strand or the antisense strand. In some embodiments, the molecular payload is an ACVR1 targeting oligonucleotide comprising at least 16 nucleotides of a sequence listed in Table 18, optionally wherein the molecular payload is an ACVR1 targeting siRNA listed in Table 19. In some embodiments, the molecular payload is a FBXO32 targeting oligonucleotide comprising at least 16 nucleotides of a sequence listed in Table 21, optionally wherein the molecular payload is a FBXO32 targeting siRNA listed in Table 22. In some embodiments, the molecular payload is a TRIM63 targeting oligonucleotide comprising at least 16 nucleotides of a sequence listed in Table 24, optionally wherein the molecular payload is a TRIM63 targeting siRNA listed in Table 25. In some embodiments, the molecular payload is a MEF2D targeting oligonucleotide comprising at least 16 nucleotides of a sequence listed in Table 27, optionally wherein the molecular payload is a MEF2D targeting siRNA listed in Table 28. In some embodiments, the molecular payload is a KLF15 targeting oligonucleotide comprising at least 16 nucleotides of a sequence listed in Table 30, optionally wherein the molecular payload is a KLF15 targeting siRNA listed in Table 31. In some embodiments, the molecular payload is a MED1 targeting oligonucleotide comprising at least 16 nucleotides of a sequence listed in Table 33, optionally wherein the molecular payload is a MED1 targeting siRNA listed in Table 34. In some embodiments, the molecular payload is a MED13 targeting oligonucleotide comprising at least 16 nucleotides of a sequence listed in Table 36, optionally wherein the molecular payload is a MED13 targeting siRNA listed in Table 37. In some embodiments, the molecular payload is a PPP1R3A targeting oligonucleotide comprising at least 16 nucleotides of a sequence listed in Table 39, optionally wherein the molecular payload is a PPP1R3A targeting siRNA listed in Table 40. In some embodiments, the oligonucleotide in the complex is an siRNA listed in Table 10, Table 13, Table 16, Table 19, Table 22, Table 25, Table 28, Table 31, Table 34, Table 37, or Table 40 which is linked at the 5′ end or 3′ end of the sense strand or the antisense strand.

[0822] In some embodiments, the complex described herein comprises an anti-TfR1 Fab covalently linked via a lysine to an oligonucleotide (e.g., an oligonucleotide targeting MSTN, INHBA, ACVR1B, MLCK1, ACVR1, FBXO32, TRIM63, MEF2D, KLF15, MED1, MED13, or PPP1R3A), wherein the anti-TfR1 Fab comprises a heavy chain comprising the amino acid sequence of SEQ ID NO: 101 and a light chain comprising the amino acid sequence of SEQ ID NO: 90; wherein the complex has the structure of:

[chemical structure]

wherein n is 3 and m is 4. In some embodiments, the molecular payload is an MSTN targeting oligonucleotide comprising at least 16 nucleotides of a sequence listed in Table 9, optionally wherein the molecular payload is an MSTN targeting siRNA listed in Table 10. In some embodiments, the molecular payload is an INHBA targeting oligonucleotide comprising at least 16 nucleotides of a sequence listed in Table 12, optionally wherein the molecular payload is an INHBA targeting siRNA listed in Table 13. In some embodiments, the molecular payload is an ACVR1B targeting oligonucleotide comprising at least 16 nucleotides of a sequence listed in Table 15, optionally wherein the molecular payload is an ACVR1B targeting siRNA listed in Table 16. In some embodiments, the oligonucleotide in the complex is an siRNA with complementarity to an MLCK1 mRNA molecule which is linked at the 5′ end or 3′ end of the sense strand or the antisense strand. In some embodiments, the molecular payload is an ACVR1 targeting oligonucleotide comprising at least 16 nucleotides of a sequence listed in Table 18, optionally wherein the molecular payload is an ACVR1 targeting siRNA listed in Table 19. In some embodiments, the molecular payload is a FBXO32 targeting oligonucleotide comprising at least 16 nucleotides of a sequence listed in Table 21, optionally wherein the molecular payload is a FBXO32 targeting siRNA listed in Table 22. In some embodiments, the molecular payload is a TRIM63 targeting oligonucleotide comprising at least 16 nucleotides of a sequence listed in Table 24, optionally wherein the molecular payload is a TRIM63 targeting siRNA listed in Table 25. In some embodiments, the molecular payload is a MEF2D targeting oligonucleotide comprising at least 16 nucleotides of a sequence listed in Table 27, optionally wherein the molecular payload is a MEF2D targeting siRNA listed in Table 28. In some embodiments, the molecular payload is a KLF15 targeting oligonucleotide comprising at least 16 nucleotides of a sequence listed in Table 30, optionally wherein the molecular payload is a KLF15 targeting siRNA listed in Table 31. In some embodiments, the molecular payload is a MED1 targeting oligonucleotide comprising at least 16 nucleotides of a sequence listed in Table 33, optionally wherein the molecular payload is a MED1 targeting siRNA listed in Table 34. In some embodiments, the molecular payload is a MED13 targeting oligonucleotide comprising at least 16 nucleotides of a sequence listed in Table 36, optionally wherein the molecular payload is a MED13 targeting siRNA listed in Table 37. In some embodiments, the molecular payload is a PPP1R3A targeting oligonucleotide comprising at least 16 nucleotides of a sequence listed in Table 39, optionally wherein the molecular payload is a PPP1R3A targeting siRNA listed in Table 40. In some embodiments, the oligonucleotide in the complex is an siRNA listed in Table 10, Table 13, Table 16, Table 19, Table 22, Table 25, Table 28, Table 31, Table 34, Table 37, or Table 40 which is linked at the 5′ end or 3′ end of the sense strand or the antisense strand.

[0823] In some embodiments, in any one of the examples of complexes described herein, L1 is:

[chemical structure]

wherein L2 is

[chemical structure]

wherein a labels the site directly linked to the carbamate moiety of formulae (B), (D), (E), and (I); and b labels the site covalently linked (directly or via additional chemical moieties) to the oligonucleotide.

[0824] In some embodiments, L1 is:

[chemical structure]

wherein a labels the site directly linked to the carbamate moiety of formulae (B), (D), (E), and (I); and b labels the site covalently linked (directly or via additional chemical moieties) to the oligonucleotide.

[0825] In some embodiments, L1 is

[chemical structure]

[0826] In some embodiments, L1 is linked to a 5′ phosphate of the oligonucleotide. In some embodiments, L1 is linked to a 5′ phosphorothioate of the oligonucleotide. In some embodiments, L1 is linked to a 5′ phosphonoamidate of the oligonucleotide.

[0827] In some embodiments, L1 is linked to a 5′ phosphate of the oligonucleotide. In some embodiments, the linkage of L1 to a 5′ phosphate of the oligonucleotide forms a phosphodiester bond between L1 and the oligonucleotide.

[0828] In some embodiments, L1 is linked to a 3′ phosphate of the oligonucleotide. In some embodiments, the linkage of L1 to a 3′ phosphate of the oligonucleotide forms a phosphodiester bond between L1 and the oligonucleotide.

[0829] In some embodiments, L1 is optional (e.g., need not be present).

### III. Formulations

[0830] Complexes provided herein may be formulated in any suitable manner. Generally, complexes provided herein are formulated in a manner suitable for pharmaceutical use. For example, complexes can be delivered to a subject using a formulation that minimizes degradation, facilitates delivery and/or uptake, or provides another beneficial property to the complexes in the formulation. In some embodiments, provided herein are compositions comprising complexes and pharmaceutically acceptable carriers. Such compositions can be suitably formulated such that when administered to a subject, either into the immediate environment of a target cell or systemically, a sufficient amount of the complexes enter target muscle cells. In some embodiments, complexes are formulated in buffer solutions such as phosphate-buffered saline solutions, liposomes, micellar structures, and capsids.

[0831] It should be appreciated that, in some embodiments, compositions may include separately one or more components of complexes provided herein (e.g., muscle-targeting agents, linkers, molecular payloads, or precursor molecules of any one of them).

[0832] In some embodiments, complexes are formulated in water or in an aqueous solution (e.g., water with pH adjustments). In some embodiments, complexes are formulated in basic buffered aqueous solutions (e.g., PBS). In some embodiments, formulations as disclosed herein comprise an excipient. In some embodiments, an excipient confers to a composition improved stability, improved absorption, improved solubility and/or therapeutic enhancement of the active ingredient. In some embodiments, an excipient is a buffering agent (e.g., sodium citrate, sodium phosphate, a tris base, or sodium hydroxide) or a vehicle (e.g., a buffered solution, petrolatum, dimethyl sulfoxide, or mineral oil).

[0833] In some embodiments, a complex or component thereof (e.g., oligonucleotide or antibody) is lyophilized for extending its shelf-life and then made into a solution before use (e.g., administration to a subject). Accordingly, an excipient in a composition comprising a complex, or component thereof, described herein may be a lyoprotectant (e.g., mannitol, lactose, polyethylene glycol, or polyvinyl pyrolidone), or a collapse temperature modifier (e.g., dextran, ficoll, or gelatin).

[0834] In some embodiments, a pharmaceutical composition is formulated to be compatible with its intended route of administration. Examples of routes of administration include parenteral, e.g., intravenous, intradermal, subcutaneous, administration. Typically, the route of administration is intravenous or subcutaneous.

[0835] Pharmaceutical compositions suitable for injectable use include sterile aqueous solutions (where water soluble) or dispersions and sterile powders for the extemporaneous preparation of sterile injectable solutions or dispersions. The carrier can be a solvent or dispersion medium containing, for example, water, ethanol, polyol (for example, glycerol, propylene glycol, and liquid polyethylene glycol, and the like), and suitable mixtures thereof. In some embodiments, formulations include isotonic agents, for example, sugars, polyalcohols such as mannitol, sorbitol, and sodium chloride in the composition. Sterile injectable solutions can be prepared by incorporating the complexes in a required amount in a selected solvent with one or a combination of ingredients enumerated above, as required, followed by filtered sterilization.

[0836] In some embodiments, a composition may contain at least about 0.1% of the complex, or component thereof, or more, although the percentage of the active ingredient(s) may be between about 1% and about 80% or more of the weight or volume of the total composition. Factors such as solubility, bioavailability, biological half-life, route of administration, product shelf life, as well as other pharmacological considerations will be contemplated by one skilled in the art of preparing such pharmaceutical formulations, and as such, a variety of dosages and treatment regimens may be desirable.

### IV. Methods of Use/Treatment

### MSTN, ACVR1B, INHBA

[0837] In some aspects, complexes comprising a muscle-targeting agent covalently linked to a molecular payload as described herein are effective in treating heart failure, muscle atrophy (e.g., skeletal and/or cardiac muscle atrophy), muscular dystrophies, cachexia (e.g., cardiac cachexia), muscle hypertrophy (e.g., cardiac hypertrophy), cardiac muscle wasting, cardiac fibrosis, and/or cardiomyopathy. In some embodiments, complexes as described herein are effective in treating myocardial complications (e.g., heart failure) in subjects having type 2 diabetes. In some embodiments, complexes are effective in treating any disease or condition that involves a thickening of the heart and/or an increase in extracellular matrix in the heart. In some embodiments, cardiac fibrosis or cardiac hypertrophy is associated with an increased level or angiotensin-II.

[0838] In some embodiments, complexes are effective in specifically targeting expression of MSTN and/or INHBA in cardiac cells. In some embodiments, complexes are effective in treating and/or preventing heart failure (e.g., involving cardiac muscle wasting, cardio myopathy, or cachexia). Heart failure is typically characterized by diverse metabolic disturbances, many of which adversely affect muscle and fat metabolism, thereby leading to cachexia. In particular, skeletal muscle atrophy is prevalent in chronic heart failure patients. In some embodiments, heart failure is associated with cardiac muscle and/or skeletal muscle wasting. In some embodiments, the heart failure is associated with cardiomyopathy, which refers to a group of diseases of the heart muscle that makes it more difficult for the heart to pump blood to the rest of the body. In some embodiments, the cardiomyopathy is dilated cardiomyopathy, in which the pumping ability of the left ventricle becomes enlarged (dilated) and decreases the effectiveness of pumping out blood. In some embodiments, the cardiomyopathy is hypertrophic cardiomyopathy, which involves abnormal thickening of the heart muscle. In some embodiments, the cardiomyopathy is restrictive cardiomyopathy, in which the heart muscle becomes rigid and less elastic. In some embodiments, the cardiomyopathy is arrhythmogenic right ventricular dysplasia in which the muscle of the right ventricle is replaced by scar tissue.

[0839] In some embodiments, the heart failure is associated with atrophy of the heart. Atrophy of the heart refers to the acquired reduction in the size and mass of the heart. In some embodiments, the atrophy is concentric atrophy in which the cavity is diminished in size, but the wall remains the same. In some embodiments, the atrophy is aneurysmal atrophy in which the walls are thinned and the heart chambers dilated. In some embodiments, the atrophy is simple type atrophy in which the muscular walls are thinned with little change in the volume of the heart. In some embodiments, the heart failure is associated with a decrease in cardiac muscle mass. In some embodiments, the heart failure is associated with a 5%, 10%, 20%, 30%, 40%, 50%, 60%, 70%, 75%, 80%, or more decrease in cardiac muscle mass.

[0840] In some embodiments, heart failure is associated with a decrease in heart function (e.g., ejection fraction). Ejection fraction is a measurement, expressed as a percentage, of how much blood the left ventricle pumps out with each contraction. In some embodiments, a typical ejection fraction is from 50% to 70%. In some embodiments, the heart failure is associated with a 5%, 10%, 20%, 30%, 40%, 50%, 60%, 70%, 75%, 80%, 85%, 90%, 95%, or greater decrease in heart function (e.g., ejection fraction or volume of blood per pump). In some embodiments, the heart failure is associated with an ejection fraction of 50%, 45%, 40%, 35%, 30%, 25%, 20%, 15%, 10%, 5%, or lower. It should be appreciated that ejection fraction is not the only measure of heart function and this disclosure is not meant to be limiting in that respect. For example, in some embodiments, the measure of heart function may be based on a measurement of the volume of blood (e.g., per pump) that the heart pumps out.

[0841] In some embodiments, the heart failure is associated with cardiac cachexia. The compositions and methods provided herein may be used to treat or prevent a subject having or at risk of developing cardiac cachexia. Cardiac cachexia is characterized, inter alia, by severe weight loss related to heart disease. Cardiac cachexia may be characterized on the basis of the presence of unintentional and non-edematous weight loss (e.g., greater than 5%, 6%, 7%, 8%, 9%, 10%, 15% or greater) of a premorbid normal weight of an individual.

[0842] One way to treat or prevent heart failure is to inhibit the negative muscle regulator, myostatin, in cardiac and/or skeletal muscle cells.

[0843] In some embodiments, a subject may be a human subject, a non-human primate subject, a rodent subject, or any suitable mammalian subject. In some embodiments, a subject may have myotonic dystrophy.

[0844] In some embodiments, a subject having muscle hypertrophy has at least one mutation in MSTN as in Schuelke, M. et al., “Myostatin Mutation Associated with Gross Muscle Hypertrophy in a Child” N Engl J Med 2004; 350:2682-2688.

[0845] In some embodiments, complexes are effective in targeting activity of MSTN and/or INHBA in any muscle tissue (e.g., cardiac muscle, skeletal muscle). In some embodiments, complexes that target activity of MSTN or INHBA in skeletal muscle tissues are effective at treating a subject having skeletal muscle atrophy (e.g., resulting from overexpressed and hyperactive MSTN or INHBA).

[0846] In some embodiments, a subject is administered complexes targeting MSTN and complexes targeting ACVR1B. In some embodiments, such administration leads to increased muscle size and function.

[0847] In some embodiments, a subject has a thickening of the heart and/or an increase in extracellular matrix in the heart. In some embodiments, a subject has and/or is suffering from cardiac fibrosis or cardiac hypertrophy. In some embodiments, a subject has and/or is suffering from angiotensin-II induced cardiac hypertrophy. In some embodiments, a subject has recently experienced a cardiac infarction (i.e., heart attack).

[0848] Cardiomyopathy is a disease of the heart muscle that makes it harder for your heart to pump blood to the rest of your body. Cardiomyopathy can lead to heart failure. The main types of cardiomyopathy include dilated, hypertrophic and restrictive cardiomyopathy.

[0849] Cardiac hypertrophy is generally characterized by atypical increase in size or thickening of the heart, resulting from atypical increase in the size of cardiomyocytes and other atypical developments in the heart, such as increased thickening of the extracellular matrix. In some embodiments, complexes are effective in reducing the size (e.g., muscle mass) or thickening of the heart of a subject having cardiac hypertrophy (e.g., by at least 5%, 10%, 20%, 30%, 40%, or 50%, relative to a control subject or baseline measurement). In some embodiments, complexes are effective in slowing the increase in size or thickening of the heart of a subject having cardiac hypertrophy (e.g., slow the rate of increase by at least 5%, 10%, 20%, 30%, 40%, or 50%, relative to a control subject or baseline rate).

[0850] In some embodiments, a cardiac hypertrophy is angiotensin II-induced cardiac hypertrophy. Angiotensin II, a common medication used to treat hypotension, has been shown to induce cardiac hypertrophy in selected patient subjects. Angiotensin II can induce cardiac hypertrophy indirectly (e.g., resulting from it vasoconstrictive effects) and/or directly (e.g., resulting from its cardiac trophic effects). In some embodiments, a subject having angiotensin II-induced cardiac hypertrophy has not previously experienced cardiac hypertrophy.

[0851] In some embodiments, the subject that has or is suspected of having impaired muscle and cardiac development has an increased level of ACVR1B expression and/or activity (e.g., increased by at least 20%, at least 30%, at least 40%, at least 50%, at least 60%, at least 70%, at least 80%, at least 90%, or more), compared to the ACVR1B expression and/or activity level in a healthy subject. In some embodiments, a complex comprising a muscle-targeting agent covalently linked to a molecular payload as described herein is effective in decreasing the ACVR1B expression and/or activity by at least 20%, at least 30%, at least 40%, at least 50%, at least 60%, at least 70%, at least 80%, at least 90%, or more. In some embodiments, a complex comprising a muscle-targeting agent covalently linked to a molecular payload as described herein is effective in decreasing the ACVR1B expression and/or activity to the level of a healthy subject.

[0852] In some embodiments, the subject that has or is suspected of having a heart disease (e.g., cardiac hypertrophy, cardiomyopathy) has an increased level of ACVR1B expression and/or activity (e.g., increased by at least 20%, at least 30%, at least 40%, at least 50%, at least 60%, at least 70%, at least 80%, at least 90%, or more), compared to the ACVR1B expression and/or activity level in a healthy subject. In some embodiments, a complex comprising a muscle-targeting agent covalently linked to a molecular payload as described herein is effective in reducing the ACVR1B expression and/or activity by at least 20%, at least 30%, at least 40%, at least 50%, at least 60%, at least 70%, at least 80%, at least 90%, or more. In some embodiments, a complex comprising a muscle-targeting agent covalently linked to a molecular payload as described herein is effective in reducing the ACVR1B expression and/or activity to the level of a healthy subject. In some embodiments, complexes are effective in specifically targeting expression of ACVR1B in cardiac cells.

[0853] In some embodiments, a pharmaceutical composition may comprise more than one complex comprising a muscle-targeting agent covalently linked to a molecular payload. As a non-limiting example, a pharmaceutical composition may comprise two or more complexes each comprising a muscle-targeting agent linked to one of MSTN, INHBA and ACVR1B. In some embodiments, a pharmaceutical composition may comprise one complex comprising a muscle targeting agent linked to a molecular payload targeting MSTN, and a second complex comprising a muscle-targeting agent linked to a molecular payload targeting ACVR1B. In some embodiments, a pharmaceutical composition may comprise one complex comprising a muscle targeting agent linked to a molecular payload targeting MSTN, and a second complex comprising a muscle-targeting agent linked to a molecular payload targeting INHBA. In some embodiments, a pharmaceutical composition may comprise one complex comprising a muscle targeting agent linked to a molecular payload targeting INHBA, and a second complex comprising a muscle-targeting agent linked to a molecular payload targeting ACVR1B. In some embodiments, treatment of a subject with complexes targeted to two or more of MSTN, INHBA and ACVR1B simultaneously leads to improved outcomes, such as increased muscle size and function, relative to treatment with a single complex targeting only one of MSTN, INHBA and ACVR1B. In some embodiments, a pharmaceutical composition may further comprise any other suitable therapeutic agent for treatment of a subject, e.g., a human subject having heart failure, muscle atrophy (including but not limited to cardiac muscle atrophy), muscular dystrophies, cachexia, cardiac fibrosis, and/or muscle hypertrophy (including but not limited to cardiac hypertrophy). In some embodiments, the other therapeutic agents may enhance or supplement the effectiveness of the complexes described herein. In some embodiments, the other therapeutic agents may function to treat a different symptom or disease than the complexes described herein.

### MLCK1

[0854] In some aspects, complexes comprising a muscle-targeting agent covalently linked to a molecular payload as described herein are effective in treating irritable bowel syndrome. In some embodiments, complexes are effective in treating patients having inflammatory bowel disease. In some embodiments, a patient having inflammatory bowel disease also suffers from irritable bowel syndrome.

[0855] In some embodiments, complexes are effective in treating patients having familial thoracic aortic aneurysms and dissections (FTAAD). In some embodiments, FTAAD is associated with a genetic mutation of MLCK1 as is described in Hannuksela M. et al. “A novel variant in MYLK causes thoracic aortic dissections: genotypic and phenotypic description.” BMC Med Genet. 2016 Sep. 1; 17(1):61; and Shalata, A. et al. “Fatal thoracic aortic aneurysm and dissection in a large family with a novel MYLK gene mutation: delineation of the clinical phenotype.” Orphanet J Rare Dis. 2018 Mar. 15; 13(1):41.

[0856] In some embodiments, complexes are effective in treating patients having Berdon syndrome (recessive megacystis microcolon intestinal hypoperistalsis syndrome). In some embodiments, Berdon syndrome is associated with a genetic mutation of MLCK1 as is described in Halim D. et al. “Loss-of-Function Variants in MYLK Cause Recessive Megacystis Microcolon Intestinal Hypoperistalsis Syndrome.” Am J Hum Genet. 2017 Jul. 6; 101(1):123-129.

[0857] In some embodiments, a subject may be a human subject, a non-human primate subject, a rodent subject, or any suitable mammalian subject.

[0858] Irritable bowel syndrome (IBS) is characterized by painful defecation, irregular stool frequency, poor stool consistency, and/or epithelial barrier dysfunction. IBS is known to occur in patients having inflammatory bowel disease who are in remission from symptoms. Symptoms of IBS can include recurrent abdominal pain or discomfort (e.g., recurrent pain or discomfort for at least 3 days per month; or at least 1 day per week in the previous 3 months), at least 25% of defecations comprise loose stools and/or at least 25% of defecations comprise irregularly hard stools.

[0859] Inflammatory bowel disease (IBD) refers to chronic conditions that cause inflammation in some part of the intestines. The intestinal walls become swollen, inflamed, and develop ulcers, which can cause discomfort and serious digestive problems. Crohn's disease is a form of IBD that can happen anywhere along the digestive tract. It affects the deeper layers of the digestive lining and can show up as “skip lesions” between healthy areas. IBD includes Crohn's disease and Ulcerative colitis. Crohn's disease often involves the small intestine, the colon, or both. Internal tissues may develop shallow, crater-like areas or deeper sores and a cobblestone pattern. Ulcerative colitis involves only the colon and rectum. Inflammation and ulcers usually affect only the lining in these areas, compared with the deeper lesions seen in Crohn's disease.

[0860] In some embodiments, complexes are effective in reducing inflammation associated with IBD. In some embodiments, complexes are effective in reducing inflammation by at least 5%, 10%, 20%, 30%, 40%, or 50%, relative to a control subject or baseline measurement.

[0861] In some embodiments, complexes are effective in reducing the frequency of abdominal pain or discomfort. In some embodiments, complexes are effective in reducing the frequency of abdominal pain or discomfort by at least 5%, 10%, 20%, 30%, 40%, or 50%, relative to a control subject or baseline measurement. In some embodiments, complexes are effective in reducing the frequency of abdominal pain or discomfort to fewer than 3, fewer than 2, or fewer than 1 day of discomfort per month.

[0862] In some embodiments, complexes are effective in reducing the frequency of defecations that comprise irregularly hard stools. In some embodiments, complexes are effective in reducing the frequency of defecations that comprise irregularly hard stools by at least 5%, 10%, 20%, 30%, 40%, or 50%, relative to a control subject or baseline measurement. In some embodiments, complexes are effective in reducing the frequency of defecations that comprise irregularly hard stools to fewer than 25%, fewer than 20%, fewer than 15%, fewer than 10%, or fewer than 5% of all defecations.

[0863] In some embodiments, complexes are effective in reducing the frequency of defecations that comprise loose stools. In some embodiments, complexes are effective in reducing the frequency of defecations that comprise loose stools by at least 5%, 10%, 20%, 30%, 40%, or 50%, relative to a control subject or baseline measurement. In some embodiments, complexes are effective in reducing the frequency of defecations that comprise loose stools to fewer than 25%, fewer than 20%, fewer than 15%, fewer than 10%, or fewer than 5% of all defecations.

### ACVR1

[0864] In some aspects, complexes comprising a muscle-targeting agent covalently linked to a molecular payload as described herein are effective in treating cardiac hypertrophy. In some embodiments, complexes are effective in treating angiotensin II-induced cardiac hypertrophy. In some embodiments, cardiac hypertrophy can lead to heart failure.

[0865] In some embodiments, complexes are effective in specifically targeting expression of ACVR1 in cardiac cells. In some embodiments, complexes are effective in treating and/or preventing cardiac hypertrophy (e.g., angiotensin II-induced cardiac hypertrophy). Cardiac hypertrophy is generally characterized by atypical increase in size or thickening of the heart, resulting from atypical increase in the size of cardiomyocytes and other atypical developments in the heart, such as increased thickening of the extracellular matrix. In some embodiments, complexes are effective in reducing the size (e.g., muscle mass) or thickening of the heart of a subject having cardiac hypertrophy (e.g., by at least 5%, 10%, 20%, 30%, 40%, or 50%, relative to a control subject or baseline measurement). In some embodiments, complexes are effective in slowing the increase in size or thickening of the heart of a subject having cardiac hypertrophy (e.g., slow the rate of increase by at least 5%, 10%, 20%, 30%, 40%, or 50%, relative to a control subject or baseline rate).

[0866] In some embodiments, a cardiac hypertrophy is angiotensin II-induced cardiac hypertrophy. Angiotensin II, a common medication used to treat hypotension, has been shown to induce cardiac hypertrophy in selected patient subjects. Angiotensin II can induce cardiac hypertrophy indirectly (e.g., resulting from its vasoconstrictive effects) and/or directly (e.g., resulting from its cardiac trophic effects). In some embodiments, a subject having angiotensin II-induced cardiac hypertrophy has not previously experienced cardiac hypertrophy.

[0867] Heart failure is typically characterized by diverse metabolic disturbances, many of which adversely affect muscle and fat metabolism, thereby leading to cachexia. In particular, skeletal muscle atrophy is prevalent in chronic heart failure patients. In some embodiments, heart failure is associated with cardiac muscle and/or skeletal muscle wasting. In some embodiments, the heart failure is associated with cardiomyopathy, which refers to a group of diseases of the heart muscle that makes it more difficult for the heart to pump blood to the rest of the body. In some embodiments, the cardiomyopathy is dilated cardiomyopathy, in which the pumping ability of the left ventricle becomes enlarged (dilated) and decreases the effectiveness of pumping out blood. In some embodiments, the cardiomyopathy is arrhythmogenic right ventricular dysplasia in which the muscle of the right ventricle is replaced by scar tissue.

[0868] In some embodiments, heart failure is associated with a decrease in heart function (e.g., ejection fraction). Ejection fraction is a measurement, expressed as a percentage, of how much blood the left ventricle pumps out with each contraction. In some embodiments, a typical ejection fraction is from 50% to 70%. In some embodiments, the heart failure is associated with a 5%, 10%, 20%, 30%, 40%, 50%, 60%, 70%, 75%, 80%, 85%, 90%, 95%, or greater decrease in heart function (e.g., ejection fraction or volume of blood per pump). In some embodiments, the heart failure is associated with an ejection fraction of 50%, 45%, 40%, 35%, 30%, 25%, 20%, 15%, 10%, 5%, or lower. It should be appreciated that ejection fraction is not the only measure of heart function and this disclosure is not meant to be limiting in that respect. For example, in some embodiments, the measure of heart function may be based on a measurement of the volume of blood (e.g., per pump) that the heart pumps out.

[0869] In some embodiments, the heart failure is associated with muscle atrophy (e.g., sarcopenia or cachexia). In some embodiments, the subject has cardiac cachexia. The compositions and methods provided herein may be used to treat or prevent a subject having or at risk of developing cardiac cachexia. Cardiac cachexia is characterized, inter alia, by severe weight loss related to heart disease. Cardiac cachexia may be characterized on the basis of the presence of nonintentional and nonedematous weight loss (e.g., greater than 5%, 6%, 7%, 8%, 9%, 10%, 15% or greater) of a premorbid normal weight of an individual.

[0870] Complexes comprising a muscle-targeting agent covalently linked to a molecular payload as described herein are effective in treating FOP. In some embodiments, complexes are effective in treating typical FOP or atypical FOP. In some embodiments, FOP is associated with mutations in the ACVR1 gene that lead to mutations in ACVR1 protein, e.g., L196P, R202I, R206H, Q207E, G328R, G328W, G328E, G356D, R375P, ΔP197-F198.

[0871] In some embodiments, a subject may be a human subject, a non-human primate subject, a rodent subject, or any suitable mammalian subject. In some embodiments, a subject may have FOP. In some embodiments, a subject having FOP has at least one mutation in the ACRV1 gene that leads to a mutation in ACVR1 protein, e.g., L196P, R202I, R206H, Q207E, G328R, G328W, G328E, G356D, R375P, ΔP197-F198. In some embodiments, a subject having FOP has progressive ossification of muscle tissues, i.e., gradual replacement of muscle tissue with bone. In some embodiments, a subject having FOP has restricted movement, loss of mobility, and/or difficulties with breathing and eating.

[0872] In some embodiments, complexes are effective in targeting activity of ACVR1 in any muscle tissue (e.g., cardiac muscle, skeletal muscle). In some embodiments, complexes are effective in treating muscle atrophy.

[0873] In some embodiments, a pharmaceutical composition may comprise more than one complex comprising a muscle-targeting agent covalently linked to a molecular payload. In some embodiments, a pharmaceutical composition may further comprise any other suitable therapeutic agent for treatment of a subject, e.g., a human subject having cardiac hypertrophy and/or FOP. In some embodiments, the other therapeutic agents may enhance or supplement the effectiveness of the complexes described herein. In some embodiments, the other therapeutic agents may function to treat a different symptom or disease than the complexes described herein.

### FBXO32, TRIM63

[0874] In some aspects, complexes comprising a muscle-targeting agent covalently linked to a molecular payload as described herein are effective in treating muscle atrophy (e.g., sarcopenia or cachexia). Muscle atrophy may be caused by any condition. In some embodiments, complexes are effective in treating muscle atrophy caused by cancer cachexia, cardiac cachexia, denervation, glucocorticoid use, inactivity (muscle disuse), abnormal levels of myostatin, and/or fasting. In some embodiments, muscle atrophy is caused by cancer cachexia, fasting, renal failure, diabetes, denervation, or glucocorticoid-induced muscle atrophy.

[0875] In some embodiments, complexes are effective in specifically targeting expression of FBXO32 or TRIM63 in cardiac cells. In some embodiments, complexes are effective in treating and/or preventing heart failure (e.g., involving cardiac muscle wasting, cardio myopathy, or cachexia). Heart failure is typically characterized by diverse metabolic disturbances, many of which adversely affect muscle and fat metabolism, thereby leading to cachexia. In particular, skeletal muscle atrophy is prevalent in chronic heart failure patients. In some embodiments, heart failure is associated with cardiac muscle and/or skeletal muscle wasting. In some embodiments, the heart failure is associated with cardiomyopathy, which refers to a group of diseases of the heart muscle that makes it more difficult for the heart to pump blood to the rest of the body. In some embodiments, the cardiomyopathy is dilated cardiomyopathy, in which the pumping ability of the left ventricle becomes enlarged (dilated) and decreases the effectiveness of pumping out blood. In some embodiments, the cardiomyopathy is hypertrophic cardiomyopathy, which involves abnormal thickening of the heart muscle. In some embodiments, the cardiomyopathy is restrictive cardiomyopathy, in which the heart muscle becomes rigid and less elastic. In some embodiments, the cardiomyopathy is arrhythmogenic right ventricular dysplasia in which the muscle of the right ventricle is replaced by scar tissue.

[0876] In some embodiments, the heart failure is associated with atrophy of the heart. Atrophy of the heart refers to the acquired reduction in the size and mass of the heart. In some embodiments, the atrophy is concentric atrophy in which the cavity is diminished in size, but the wall remains the same. In some embodiments, the atrophy is aneurysmal atrophy in which the walls are thinned and the heart chambers dilated. In some embodiments, the atrophy is simple type atrophy in which the muscular walls are thinned with little change in the volume of the heart. In some embodiments, the heart failure is associated with a decrease in cardiac muscle mass. In some embodiments, the heart failure is associated with a 5%, 10%, 20%, 30%, 40%, 50%, 60%, 70%, 75%, 80%, or more decrease in cardiac muscle mass.

[0877] In some embodiments, heart failure is associated with a decrease in heart function (e.g., ejection fraction). Ejection fraction is a measurement, expressed as a percentage, of how much blood the left ventricle pumps out with each contraction. In some embodiments, a typical ejection fraction is from 50% to 70%. In some embodiments, the heart failure is associated with a 5%, 10%, 20%, 30%, 40%, 50%, 60%, 70%, 75%, 80%, 85%, 90%, 95%, or greater decrease in heart function (e.g., ejection fraction or volume of blood per pump). In some embodiments, the heart failure is associated with an ejection fraction of 50%, 45%, 40%, 35%, 30%, 25%, 20%, 15%, 10%, 5%, or lower. It should be appreciated that ejection fraction is not the only measure of heart function and this disclosure is not meant to be limiting in that respect. For example, in some embodiments, the measure of heart function may be based on a measurement of the volume of blood (e.g., per pump) that the heart pumps out.

[0878] In some embodiments, the heart failure is associated with cardiac cachexia. The compositions and methods provided herein may be used to treat or prevent a subject having or at risk of developing cardiac cachexia. Cardiac cachexia is characterized, inter alia, by severe weight loss related to heart disease. Cardiac cachexia may be characterized on the basis of the presence of nonintentional and nonedematous weight loss (e.g., greater than 5%, 6%, 7%, 8%, 9%, 10%, 15% or greater) of a premorbid normal weight of an individual.

[0879] In some embodiments, a subject may be a human subject, a non-human primate subject, a rodent subject, or any suitable mammalian subject. In some embodiments, a subject has increased levels of FBXO32 or TRIM63 as compared to a control.

[0880] In some embodiments, the subject has cancer cachexia, cardiac cachexia, denervation, glucocorticoid use, diabetes, renal failure, inactivity (e.g., muscle disuse), elevated levels of myostatin, and/or is fasting. In some embodiments, the subject has reduced muscle mass, reduced muscle size and/or reduced number of muscle cells as compared to a control. In some embodiments, a control is a healthy subject. As a non-limiting example, ultrasounds and/or magnetic resonance imaging (MRI) may be used to diagnose a subject with muscle atrophy. In some embodiments, muscle atrophy affects slow type 1 or fast type 2 muscle fibers in a subject. See, e.g., Talbot et al., Wiley Interdiscip Rev Dev Biol. 2016 July; 5(4):518-34, which is herein incorporated by reference in its entirety. In some embodiments, the subject does not have peripheral artery disease. In some embodiments, the peripheral arterial system of the subject is intact. In some instances, the muscle atrophy may not be localized to the subject's lower or hind limb extremities.

[0881] In some embodiments, complexes comprising a muscle-targeting agent covalently linked to a molecular payload (e.g., a mRNA encoding FBXO32 or a FBXO32 polypeptide) are effective in treating cardiac hypertrophy. In some embodiments, a subject that has cardiac hypertrophy has a reduced FBXO32 expression level in heart muscle cells (e.g., reduced by at least 10%, at least 20%, at least 30%, at least 40%, at least 50%, at least 60%, at least 70%, at least 80%, at least 90%, at least 95%, at least 99%, or more), compared to a healthy subject. In some embodiments, the complexes comprising a muscle-targeting agent covalently linked to a molecular payload (e.g., a mRNA encoding FBXO32 or a FBXO32 polypeptide as described herein increases FBXO32 expression level in heart muscle cells by at least 20%, at least 30%, at least 40%, at least 50%, at least 60%, at least 70%, at least 80%, at least 90%, at least 95%, at least 2-fold, at least 5-fold, at least 10-fold, at least 50-fold, at least 100-fold, or more), compared to without the complexes.

### MEF2D, KLF15, MED1, MED13, or PPP1R3A

[0882] In some aspects, complexes comprising a muscle-targeting agent covalently linked to a molecular payload as described herein are effective in treating subjects having impaired muscle and cardiac development (e.g. congenital heart defect), a muscular disease (e.g., muscle atrophy, myotonic dystrophy, cachexia), a heart disease (e.g., cardiac atrophy, cardiac hypertrophy, cardiomyopathy, cardiovascular disease, congenital heart disease, heart arrhythmias), heart failure, or a neuromuscular disease (e.g., Parkinson's disease, amyotrophic lateral sclerosis (ALS)). In some embodiments, the subject has coronary artery disease or high blood pressure. In some embodiments, the subject has a heart valve abnormality. In some embodiments, the subject has a heart murmur that is expected to lead to heart failure. In some embodiments, the subject has heart failure at Stage A, B, C, or D. In some embodiments, the subject has or is at risk of having congestive heart failure.

[0883] In some embodiments, a subject may be a human subject, a non-human primate subject, a rodent subject, or any suitable mammalian subject. In some embodiments, a subject may have myotonic dystrophy. In some embodiments, a subject has experienced a myocardial infarction (e.g., at least one myocardial infarction). In some embodiments, a subject has experienced 2, 3, 4, 5, 6, or more myocardial infarctions. In some embodiments, a subject is at an elevated risk of myocardial infarction.

[0884] Cardiomyopathy is a disease of the heart muscle that makes it harder for your heart to pump blood to the rest of your body. Cardiomyopathy can lead to heart failure. The main types of cardiomyopathy include dilated, hypertrophic and restrictive cardiomyopathy.

[0885] Cardiac hypertrophy is generally characterized by atypical increase in size or thickening of the heart, resulting from atypical increase in the size of cardiomyocytes and other atypical developments in the heart, such as increased thickening of the extracellular matrix. In some embodiments, complexes are effective in reducing the size (e.g., muscle mass) or thickening of the heart of a subject having cardiac hypertrophy (e.g., by at least 5%, 10%, 20%, 30%, 40%, or 50%, relative to a control subject or baseline measurement). In some embodiments, complexes are effective in slowing the increase in size or thickening of the heart of a subject having cardiac hypertrophy (e.g., slow the rate of increase by at least 5%, 10%, 20%, 30%, 40%, or 50%, relative to a control subject or baseline rate).

[0886] In some embodiments, a cardiac hypertrophy is angiotensin II-induced cardiac hypertrophy. Angiotensin II, a common medication used to treat hypotension, has been shown to induce cardiac hypertrophy in selected patient subjects. Angiotension II can induce cardiac hypertrophy indirectly (e.g., resulting from its vasoconstrictive effects) and/or directly (e.g., resulting from its cardiac trophic effects). In some embodiments, a subject having angiotensin IT-induced cardiac hypertrophy has not previously experienced cardiac hypertrophy.

[0887] Heart failure is typically characterized by diverse metabolic disturbances, many of which adversely affect muscle and fat metabolism, thereby leading to cachexia. In particular, skeletal muscle atrophy is prevalent in chronic heart failure patients. In some embodiments, heart failure is associated with cardiac muscle and/or skeletal muscle wasting. In some embodiments, the heart failure is associated with cardiomyopathy, which refers to a group of diseases of the heart muscle that makes it more difficult for the heart to pump blood to the rest of the body. In some embodiments, the cardiomyopathy is dilated cardiomyopathy, in which the pumping ability of the left ventricle becomes enlarged (dilated) and decreases the effectiveness of pumping out blood. In some embodiments, the cardiomyopathy is arrhythmogenic right ventricular dysplasia in which the muscle of the right ventricle is replaced by scar tissue.

[0888] In some embodiments, heart failure is associated with a decrease in heart function (e.g., ejection fraction). Ejection fraction is a measurement, expressed as a percentage, of how much blood the left ventricle pumps out with each contraction. In some embodiments, a typical ejection fraction is from 50% to 70%. In some embodiments, the heart failure is associated with a 5%, 10%, 20%, 30%, 40%, 50%, 60%, 70%, 75%, 80%, 85%, 90%, 95%, or greater decrease in heart function (e.g., ejection fraction or volume of blood per pump). In some embodiments, the heart failure is associated with an ejection fraction of 50%, 45%, 40%, 35%, 30%, 25%, 20%, 15%, 10%, 5%, or lower. It should be appreciated that ejection fraction is not the only measure of heart function and this disclosure is not meant to be limiting in that respect. For example, in some embodiments, the measure of heart function may be based on a measurement of the volume of blood (e.g., per pump) that the heart pumps out.

[0889] In some embodiments, the heart failure is associated with cardiac cachexia. The compositions and methods provided herein may be used to treat or prevent a subject having or at risk of developing cardiac cachexia. Cardiac cachexia is characterized, inter alia, by severe weight loss related to heart disease. Cardiac cachexia may be characterized on the basis of the presence of nonintentional and nonedematous weight loss (e.g., greater than 5%, 6%, 7%, 8%, 9%, 10%, 15% or greater) of a premorbid normal weight of an individual.

[0890] In some embodiments, the heart failure is associated with atrophy of the heart. Atrophy of the heart refers to the acquired reduction in the size and mass of the heart. In some embodiments, the atrophy is concentric atrophy in which the cavity is diminished in size, but the wall remains the same. In some embodiments, the atrophy is aneurysmal atrophy in which the walls are thinned and the heart chambers dilated. In some embodiments, the atrophy is simple type atrophy in which the muscular walls are thinned with little change in the volume of the heart. In some embodiments, the heart failure is associated with a decrease in cardiac muscle mass. In some embodiments, the heart failure is associated with a 5%, 10%, 20%, 30%, 40%, 50%, 60%, 70%, 75%, 80%, or more decrease in cardiac muscle mass.

[0891] Muscle atrophy may be caused by any condition. In some embodiments, complexes are effective in treating muscle atrophy caused by cancer cachexia, cardiac cachexia, acute lung injury, denervation, glucocorticoid use, inactivity (muscle disuse), abnormal levels of myostatin, and/or fasting. In some embodiments, muscle atrophy is caused by cancer cachexia, fasting, renal failure, diabetes, denervation, or glucocorticoid-induced muscle atrophy. As a non-limiting example, ultrasounds and/or magnetic resonance imaging (MRI) may be used to diagnose a subject with muscle atrophy. In some embodiments, muscle atrophy affects slow type 1 or fast type 2 muscle fibers in a subject. See, e.g., Talbot et al., Wiley Interdiscip Rev Dev Biol. 2016 July; 5(4):518-34, which is herein incorporated by reference in its entirety. In some embodiments, the subject does not have peripheral artery disease. In some embodiments, the peripheral arterial system of the subject is intact. In some instances, the muscle atrophy may not be localized to the subject's lower or hind limb extremities.

[0892] Myotonic dystrophy is a long-term genetic disorder that affects muscle function. Symptoms include gradually worsening muscle loss and weakness. There are two main types of myotonic dystrophy: type 1 (DM1), due to mutations in the DMPK gene, and type 2 (DM2), due to mutations in the CNBP gene.

[0893] Parkinson's disease (PD) is a long-term degenerative disorder of the central nervous system that mainly affects the motor system. As the disease worsens, non-motor symptoms become more common. Early in the disease, the most obvious symptoms are shaking, rigidity, slowness of movement, and difficulty with walking. Thinking and behavioral problems may also occur. Dementia becomes common in the advanced stages of the disease. Depression and anxiety are also common, occurring in more than a third of people with PD.

[0894] Amyotrophic lateral sclerosis (ALS) causes the death of neurons controlling voluntary muscles. ALS is characterized by stiff muscles, muscle twitching, and gradually worsening weakness due to muscles decreasing in size. It may begin with weakness in the arms or legs, or with difficulty speaking or swallowing. About half of the people affected develop at least mild difficulties with thinking and behavior and most people experience pain. Most eventually lose the ability to walk, use their hands, speak, swallow, and breathe.

[0895] In some embodiments, complexes are effective in specifically targeting expression of MEF2D, KLF15, MED1, MED13, or PPP1R3A in cardiac cells. In some embodiments, complexes are effective in treating and/or preventing impaired muscle and cardiac development (e.g. congenital heart defect), a muscular disease (e.g., muscle atrophy, myotonic dystrophy, cachexia), a heart disease (e.g., cardiac atrophy, cardiac hypertrophy, cardiomyopathy, cardiovascular disease, congenital heart disease, heart arrhythmias), heart failure, or a neuromuscular disease (e.g., Parkinson's disease, amyotrophic lateral sclerosis (ALS)).

[0896] In some embodiments, the subject that has or is suspected of having impaired muscle and cardiac development has a decreased level of MEF2D, expression and/or activity (e.g., decreased by at least 20%, at least 30%, at least 40%, at least 50%, at least 60%, at least 70%, at least 80%, at least 90%, or more), compared to the MEF2D expression and/or activity level in a healthy subject. In some embodiments, a complex comprising a muscle-targeting agent covalently linked to a molecular payload as described herein is effective in increasing expression and/or activity by at least 20%, at least 30%, at least 40%, at least 50%, at least 60%, at least 70%, at least 80%, at least 90%, or more. In some embodiments, a complex comprising a muscle-targeting agent covalently linked to a molecular payload as described herein is effective in increasing the MEF2D expression and/or activity to the level of a healthy subject.

[0897] In some embodiments, the subject that has or is suspected of having a heart disease (e.g., cardiac hypertrophy, cardiomyopathy) has an increased level of MEF2D expression and/or activity (e.g., increased by at least 20%, at least 30%, at least 40%, at least 50%, at least 60%, at least 70%, at least 80%, at least 90%, or more), compared to the MEF2D expression and/or activity level in a healthy subject. In some embodiments, a complex comprising a muscle-targeting agent covalently linked to a molecular payload as described herein is effective in reducing the MEF2D expression and/or activity by at least 20%, at least 30%, at least 40%, at least 50%, at least 60%, at least 70%, at least 80%, at least 90%, or more. In some embodiments, a complex comprising a muscle-targeting agent covalently linked to a molecular payload as described herein is effective in reducing the MEF2D expression and/or activity to the level of a healthy subject. In some embodiments, complexes are effective in specifically targeting expression of MEF2D in cardiac cells.

[0898] In some embodiments, the subject that has or is suspected of having Parkinson's disease has a decreased level of MEF2D expression and/or activity (e.g., decreased by at least 20%, at least 30%, at least 40%, at least 50%, at least 60%, at least 70%, at least 80%, at least 90%, or more), compared to the MEF2D expression and/or activity level in a healthy subject. In some embodiments, a complex comprising a muscle-targeting agent covalently linked to a molecular payload as described herein is effective in increasing the MEF2D expression and/or activity by at least 20%, at least 30%, at least 40%, at least 50%, at least 60%, at least 70%, at least 80%, at least 90%, or more. In some embodiments, a complex comprising a muscle-targeting agent covalently linked to a molecular payload as described herein is effective in increasing the MEF2D expression and/or activity to the level of a healthy subject.

[0899] In some embodiments, the subject that has or is suspected of having ALS has an increased level of MEF2D expression and/or activity (e.g., increased by at least 20%, at least 30%, at least 40%, at least 50%, at least 60%, at least 70%, at least 80%, at least 90%, or more), compared to the MEF2D expression and/or activity level in a healthy subject. In some embodiments, a complex comprising a muscle-targeting agent covalently linked to a molecular payload as described herein is effective in reducing the MEF2D expression and/or activity by at least 20%, at least 30%, at least 40%, at least 50%, at least 60%, at least 70%, at least 80%, at least 90%, or more. In some embodiments, a complex comprising a muscle-targeting agent covalently linked to a molecular payload as described herein is effective in reducing the MEF2D expression and/or activity to the level of a healthy subject.

[0900] In some embodiments, the subject that has or is suspected of having a muscular disease (e.g., muscle atrophy, myotonic dystrophy) expresses an isoform of MEF2D lacking the β-exon (e.g., as described in Lee et al., The Journal of Biological Chemistry, 285, 33779-33787, 2010, incorporated herein by reference). In some embodiments, a complex comprising a muscle-targeting agent covalently linked to a molecular payload as described herein is effective in reducing the MEF2D isoform expression and/or activity by at least 20%, at least 30%, at least 40%, at least 50%, at least 60%, at least 70%, at least 80%, at least 90%, or more.

[0901] In some embodiments, the subject that has or is suspected of having impaired muscle and cardiac development has a decreased level of KLF15, expression and/or activity (e.g., decreased by at least 20%, at least 30%, at least 40%, at least 50%, at least 60%, at least 70%, at least 80%, at least 90%, or more), compared to the KLF15 expression and/or activity level in a healthy subject. In some embodiments, a complex comprising a muscle-targeting agent covalently linked to a molecular payload as described herein is effective in increasing expression and/or activity by at least 20%, at least 30%, at least 40%, at least 50%, at least 60%, at least 70%, at least 80%, at least 90%, or more. In some embodiments, a complex comprising a muscle-targeting agent covalently linked to a molecular payload as described herein is effective in increasing the KLF15 expression and/or activity to the level of a healthy subject.

[0902] In some embodiments, the subject that has or is suspected of having a heart disease (e.g., cardiac hypertrophy, cardiomyopathy) has a decreased level of KLF15 expression and/or activity (e.g., decreased by at least 20%, at least 30%, at least 40%, at least 50%, at least 60%, at least 70%, at least 80%, at least 90%, or more), compared to the KLF15 expression and/or activity level in a healthy subject. In some embodiments, a complex comprising a muscle-targeting agent covalently linked to a molecular payload as described herein is effective in increasing the KLF15 expression and/or activity by at least 20%, at least 30%, at least 40%, at least 50%, at least 60%, at least 70%, at least 80%, at least 90%, or more. In some embodiments, a complex comprising a muscle-targeting agent covalently linked to a molecular payload as described herein is effective in increasing the KLF15 expression and/or activity to the level of a healthy subject. In some embodiments, complexes are effective in specifically targeting expression of KLF15 in cardiac cells.

[0903] In some embodiments, the subject that has heart arrhythmia has an increased level of KLF15 expression and/or activity (e.g., increased by at least 20%, at least 30%, at least 40%, at least 50%, at least 60%, at least 70%, at least 80%, at least 90%, or more), compared to the KLF15 expression and/or activity level in a healthy subject. In some embodiments, a complex comprising a muscle-targeting agent covalently linked to a molecular payload as described herein is effective in reducing the KLF15 expression and/or activity by at least 20%, at least 30%, at least 40%, at least 50%, at least 60%, at least 70%, at least 80%, at least 90%, or more. In some embodiments, a complex comprising a muscle-targeting agent covalently linked to a molecular payload as described herein is effective in reducing the KLF15 expression and/or activity to the level of a healthy subject.

[0904] In some embodiments, the subject that has heart arrhythmia has a decreased level of KLF15 expression and/or activity (e.g., decreased by at least 20%, at least 30%, at least 40%, at least 50%, at least 60%, at least 70%, at least 80%, at least 90%, or more), compared to the KLF15 expression and/or activity level in a healthy subject. In some embodiments, a complex comprising a muscle-targeting agent covalently linked to a molecular payload as described herein is effective in increasing the KLF15 expression and/or activity by at least 20%, at least 30%, at least 40%, at least 50%, at least 60%, at least 70%, at least 80%, at least 90%, or more. In some embodiments, a complex comprising a muscle-targeting agent covalently linked to a molecular payload as described herein is effective in increasing the KLF15 expression and/or activity to the level of a healthy subject.

[0905] In some embodiments, complexes are effective in treating cardiovascular disease (e.g., congenital heart disease or congenital heart defect) in subjects having a wild-type MED13. In some embodiments, complexes to treat cardiovascular disease promote or enhance the expression or activity of wild-type MED13.

[0906] In some embodiments, complexes are effective in treating cardiovascular disease (e.g., congenital heart disease or congenital heart defect) in subjects having a mutated MED13 gene. In some embodiments, complexes to treat cardiovascular disease having mutated MED13 inhibit the expression or activity of mutant MED13. In some embodiments, subjects have a mutated allele of MED13 comprising a missense mutation. In some embodiments, a mutated allele of MED13 encodes a T326I, P327S and/or P327Q mutation. In some embodiments, a mutated allele of MED13 comprises an in-frame deletion (e.g., of nucleotides encoding T326).

[0907] In some embodiments, a pharmaceutical composition may comprise more than one complex comprising a muscle-targeting agent covalently linked to a molecular payload. In some embodiments, a pharmaceutical composition may further comprise any other suitable therapeutic agent for treatment of a subject, e.g. a human subject having impaired muscle and cardiac development (e.g. congenital heart defect), a muscular disease (e.g., muscle atrophy, myotonic dystrophy, cachexia), a heart disease (e.g., cardiac atrophy, cardiac hypertrophy, cardiomyopathy, cardiovascular disease, congenital heart disease, heart arrhythmias), heart failure, or a neuromuscular disease (e.g., Parkinson's disease, amyotrophic lateral sclerosis (ALS)). In some embodiments, the other therapeutic agents may enhance or supplement the effectiveness of the complexes described herein. In some embodiments, the other therapeutic agents may function to treat a different symptom or disease than the complexes described herein.

[0908] An aspect of the disclosure includes methods involving administering to a subject an effective amount of a complex as described herein. In some embodiments, an effective amount of a pharmaceutical composition that comprises a complex comprising a muscle-targeting agent covalently linked to a molecular payload can be administered to a subject in need of treatment. In some embodiments, a pharmaceutical composition comprising a complex as described herein may be administered by a suitable route, which may include intravenous administration, e.g., as a bolus or by continuous infusion over a period of time. In some embodiments, intravenous administration may be performed by intramuscular, intraperitoneal, intracerebrospinal, subcutaneous, intra-articular, intrasynovial, or intrathecal routes. In some embodiments, a pharmaceutical composition may be in solid form, aqueous form, or a liquid form. In some embodiments, an aqueous or liquid form may be nebulized or lyophilized. In some embodiments, a nebulized or lyophilized form may be reconstituted with an aqueous or liquid solution.

[0909] Compositions for intravenous administration may contain various carriers such as vegetable oils, dimethylactamide, dimethyformamide, ethyl lactate, ethyl carbonate, isopropyl myristate, ethanol, and polyols (glycerol, propylene glycol, liquid polyethylene glycol, and the like). For intravenous injection, water soluble antibodies can be administered by the drip method, whereby a pharmaceutical formulation containing the antibody and a physiologically acceptable excipients is infused. Physiologically acceptable excipients may include, for example, 5% dextrose, 0.9% saline, Ringer's solution or other suitable excipients. Intramuscular preparations, e.g., a sterile formulation of a suitable soluble salt form of the antibody, can be dissolved and administered in a pharmaceutical excipient such as Water-for-Injection, 0.9% saline, or 5% glucose solution.

[0910] In some embodiments, a pharmaceutical composition that comprises a complex comprising a muscle-targeting agent covalently linked to a molecular payload is administered via site-specific or local delivery techniques. Examples of these techniques include implantable depot sources of the complex, local delivery catheters, site specific carriers, direct injection, or direct application.

[0911] In some embodiments, a pharmaceutical composition that comprises a complex comprising a muscle-targeting agent covalently linked to a molecular payload is administered at an effective concentration that confers therapeutic effect on a subject. Effective amounts vary, as recognized by those skilled in the art, depending on the severity of the disease, unique characteristics of the subject being treated, e.g., age, physical conditions, health, or weight, the duration of the treatment, the nature of any concurrent therapies, the route of administration and related factors. These related factors are known to those in the art and may be addressed with no more than routine experimentation. In some embodiments, an effective concentration is the maximum dose that is considered to be safe for the patient. In some embodiments, an effective concentration will be the lowest possible concentration that provides maximum efficacy.

[0912] Empirical considerations, e.g., the half-life of the complex in a subject, generally will contribute to determination of the concentration of pharmaceutical composition that is used for treatment. The frequency of administration may be empirically determined and adjusted to maximize the efficacy of the treatment.

[0913] Generally, for administration of any of the complexes described herein, an initial candidate dosage may be about 1 to 100 mg/kg, or more, depending on the factors described above, e.g., safety or efficacy. In some embodiments, a treatment will be administered once. In some embodiments, a treatment will be administered daily, biweekly, weekly, bimonthly, monthly, or at any time interval that provide maximum efficacy while minimizing safety risks to the subject. Generally, the efficacy and the treatment and safety risks may be monitored throughout the course of treatment

[0914] The efficacy of treatment may be assessed using any suitable methods. In some embodiments, the efficacy of treatment may be assessed by evaluation of observation of symptoms associated with a disease treated with complexes described herein, e.g., irritable bowel syndrome, inflammatory bowel disease, heart failure, muscle atrophy, muscular dystrophies, cachexia, cardiac fibrosis, and/or muscle hypertrophy (including but not limited to cardiac hypertrophy). For example, a subject with muscle atrophy may have difficulty balancing, have been inactive for an extended period, have malnutrition, have a limb that is noticeably smaller in size than another limb, and/or is experiencing weakness. Suitable methods of assessing muscle atrophy include ultrasounds, magnetic resonance imaging, and muscle biopsies. For example, the extent of muscle atrophy may be determined by determining the shape of muscle fibers. Expression and/or activity of a target gene described herein (e.g., MSTN, INHBA, ACVR1B, MLCK1, ACVR1, FBXO32, TRIM63, MEF2D, KLF15, MED1, MED13, or PPP1R3A) may also be assessed using any suitable method. For example, levels of a target mRNA and/or protein may be assayed to determine whether a treatment reduces target gene expression.

[0915] In some embodiments, a pharmaceutical composition that comprises a complex comprising a muscle-targeting agent covalently linked to a molecular payload described herein is administered to a subject at an effective concentration sufficient to inhibit activity or expression of a target gene by at least 10%, at least 20%, at least 30%, at least 40%, at least 50%, at least 60%, at least 70%, at least 80%, at least 90% or at least 95% relative to a control, e.g. baseline level of gene expression prior to treatment.

[0916] In some embodiments, a single dose or administration of a pharmaceutical composition that comprises a complex comprising a muscle-targeting agent covalently linked to a molecular payload described herein to a subject is sufficient to inhibit activity or expression of a target gene for at least 1-5, 1-10, 5-15, 10-20, 15-30, 20-40, 25-50, or more days. In some embodiments, a single dose or administration of a pharmaceutical composition that comprises a complex comprising a muscle-targeting agent covalently linked to a molecular payload described herein to a subject is sufficient to inhibit activity or expression of a target gene for at least 1, 2, 3, 4, 5, 6, 7, 8, 9, 10, 11, or 12 weeks. In some embodiments, a single dose or administration of a pharmaceutical composition that comprises a complex comprising a muscle-targeting agent covalently linked to a molecular payload described herein to a subject is sufficient to inhibit activity or expression of a target gene for at least 1, 2, 3, 4, 5, or 6 months.

[0917] In some embodiments, a pharmaceutical composition may further comprise any other suitable therapeutic agent for treatment of a subject, e.g., a human subject having muscle atrophy or cardiac hypertrophy. In some embodiments, the other therapeutic agents may enhance or supplement the effectiveness of the complexes described herein. In some embodiments, the other therapeutic agents may function to treat a different symptom or disease than the complexes described herein.

### EXAMPLES

### Example 1: Targeting HPRT with Transfected Antisense Oligonucleotides

[0918] A siRNA that targets hypoxanthine phosphoribosyltransferase (HPRT) was tested in vitro for its ability to reduce expression levels of HPRT in an immortalized cell line. Briefly, Hepa 1-6 cells were transfected with either a control siRNA (siCTRL; 100 nM) or the siRNA that targets HPRT (siHPRT; 100 nM), formulated with Lipofectamine 2000. HPRT expression levels were evaluated 48 hours following transfection. A control experiment was also performed in which vehicle (phosphate-buffered saline) was delivered to Hepa 1-6 cells in culture and the cells were maintained for 48 hours. As shown in FIG. 1, it was found that the HPRT siRNA reduced HPRT expression levels by about 90% compared with controls. Sequences of the siRNAs used are provided in Table 41.

TABLE 41
Sequences of siHPRT and siCTRL

| | Sequence | SEQ ID NO |
|---|---|---|
| siHPRT sense strand | 5′-UcCuAuGaCuGuAgAuUuUaU-(CH₂)₆NH₂-3′ | 371 |
| siHPRT antisense strand | 5′-aUaAaAuCuAcAgUcAuAgGasAsu-3′ | 372 |
| siCTRL sense strand | 5′-UgUaAuAaCcAuAuCuAcCuU-(CH₂)₆NH₂-3′ | 373 |
| siCTRL antisense strand | 5′-aAgGuAgAuAuGgUuAuUaCasAsa-3′ | 374 |

*Lower case-2′-O-Me ribonucleoside; Capital letter-2′-F ribonucleoside; s-phosphorothioate linkage

### Example 2: Targeting HPRT with a Muscle-Targeting Complex

[0919] A muscle-targeting complex was generated comprising the HPRT siRNA used in Example 1 (siHPRT) covalently linked, via a non-cleavable N-gamma-maleimidobutyryl-oxysuccinimide ester (GMBS) linker, to RI7 217 anti-TfR1 Fab (DTX-A-002), an anti-transferrin receptor antibody.

[0920] Briefly, the GMBS linker was dissolved in dry DMSO and coupled to the 3′ end of the sense strand of siHPRT through amide bond formation under aqueous conditions. Completion of the reaction was verified by Kaiser test. Excess linker and organic solvents were removed by gel permeation chromatography. The purified, maleimide functionalized sense strand of siHPRT was then coupled to DTX-A-002 antibody using a Michael addition reaction.

[0921] The product of the antibody coupling reaction was then subjected to size exclusion chromatography (SEC) purification. antiTfR-siHPRT complexes comprising one or two siHPRT molecules covalently linked to DTX-A-002 antibody were purified. Densitometry confirmed that the purified sample of complexes had an average siHPRT to antibody ratio of 1.46. SDS-PAGE analysis demonstrated that >90% of the purified sample of complexes comprised DTX-A-002 linked to either one or two siHPRT molecules.

[0922] Using the same methods as described above, a control IgG2a-siHPRT complex was generated comprising the HPRT siRNA used in Example 1 (siHPRT) covalently linked via the GMBS linker to an IgG2a (Fab) antibody (DTX-A-003). Densitometry confirmed that DTX-C-001 (the control IgG2a-siHPRT complex) had an average siHPRT to antibody ratio of 1.46 and SDS-PAGE demonstrated that >90% of the purified sample of control complexes comprised DTX-A-003 linked to either one or two siHPRT molecules.

[0923] The antiTfR-siHPRT complex was then tested for cellular internalization and inhibition of HPRT in cellulo. Hepa 1-6 cells, which have relatively high expression levels of transferrin receptor, were incubated in the presence of vehicle (phosphate-buffered saline), IgG2a-siHPRT (100 nM), antiTfR-siCTRL (100 nM), or antiTfR-siHPRT (100 nM), for 72 hours. After the 72 hour incubation, the cells were isolated and assayed for expression levels of HPRT (FIG. 2). Cells treated with the antiTfR-siHPRT demonstrated a reduction in HPRT expression by about 50% relative to the cells treated with the vehicle control and to those treated with the IgG2a-siHPRT complex. Meanwhile, cells treated with either of the IgG2a-siHPRT or antiTfR-siCTRL had HPRT expression levels comparable to the vehicle control (no reduction in HPRT expression). These data indicate that the anti-transferrin receptor 1 antibody of the antiTfR-siHPRT enabled cellular internalization of the complex, thereby allowing the siHPRT to inhibit expression of HPRT.

### Example 3: Targeting HPRT in Mouse Muscle Tissues with a Muscle-Targeting Complex

[0924] The muscle-targeting complex described in Example 2, antiTfR-siHPRT, was tested for inhibition of HPRT in mouse tissues. C57BL/6 wild-type mice were intravenously injected with a single dose of a vehicle control (phosphate-buffered saline); siHPRT (2 mg/kg of RNA); IgG2a-siHPRT (2 mg/kg of RNA, corresponding to 9 mg/kg antibody complex); or antiTfR-siHPRT (2 mg/kg of RNA, corresponding to 9 mg/kg antibody complex). Each experimental condition was replicated in four individual C57BL/6 wild-type mice. Following a three-day period after injection, the mice were euthanized and segmented into isolated tissue types. Individual tissue samples were subsequently assayed for expression levels of HPRT (FIGS. 3A-3B and 4A-4E).

[0925] Mice treated with the antiTfR-siHPRT complex demonstrated a reduction in HPRT expression in heart (30% reduction; p<0.05) and gastrocnemius (31% reduction; p<0.05), relative to the mice treated with the siHPRT control (FIGS. 3A-3B). Meanwhile, mice treated with the IgG2a-siHPRT complex had HPRT expression levels comparable to the siHPRT control (little or no reduction in HPRT expression) for all assayed muscle tissue types.

[0926] Mice treated with the antiTfR-siHPRT complex demonstrated no change in HPRT expression in non-muscle tissues such as brain, liver, lung, kidney, and spleen tissues (FIGS. 4A-4E).

[0927] These data indicate that the anti-transferrin receptor 1 antibody of the antiTfR-siHPRT complex enabled cellular internalization of the complex into muscle-specific tissues in an in vivo mouse model, thereby allowing the siHPRT to inhibit expression of HPRT. These data further demonstrate that the antiTfR-oligonucleotide complexes of the current disclosure are capable of specifically targeting muscle tissues.

### Example 4: Targeting MSTN with a Muscle-Targeting Complex

[0928] A muscle-targeting complex is generated comprising an antisense oligonucleotide that targets an allele of MSTN (MSTN ASO) covalently linked, via a cathepsin cleavable linker, to DTX-A-002 (RI7 217 Fab), an anti-transferrin receptor 1 antibody.

[0929] Briefly, a maleimidocaproyl-L-valine-L-citrulline-p-aminobenzyl alcohol p-nitrophenyl carbonate (MC-Val-Cit-PABC-PNP) linker molecule is coupled to NH₂—C₆-DNM2 ASO using an amide coupling reaction. Excess linker and organic solvents are removed by gel permeation chromatography. The purified Val-Cit-linker-DNM2 ASO is then coupled to a thiol on the anti-transferrin receptor 1 antibody (DTX-A-002).

[0930] The product of the antibody coupling reaction is then subjected to hydrophobic interaction chromatography (HIC-HPLC) to purify the muscle-targeting complex. Densitometry and SDS-PAGE analysis of the purified complex allow for determination of the average ratio of ASO-to-antibody and total purity, respectively.

[0931] Using the same methods as described above, a control complex is generated comprising MSTN ASO covalently linked via a Val-Cit linker to an IgG2a (Fab) antibody. The purified muscle-targeting complex comprising DTX-A-002 covalently linked to MSTN ASO is then tested for cellular internalization and inhibition of MSTN. Disease-relevant muscle cells that have relatively high expression levels of transferrin receptor, are incubated in the presence of vehicle control (saline), muscle-targeting complex (100 nM), or control complex (100 nM) for 72 hours. After the 72 hour incubation, the cells are isolated and assayed for expression levels of MSTN.

### Example 5: Identification of Candidate Oligonucleotides for Inhibiting MSTN

[0932] To identify candidate oligonucleotides for inhibiting MSTN, siRNAs were screened for suppression of MSTN expression. Cells were treated with 0.1 nM or 10 nM of each siRNA and gene expression was measured. The siRNAs Each siRNA was designed to have cross-species activity. FIG. 5 shows MSTN gene expression data for each of the 24 siRNAs tested at both doses. Four siRNAs from this screen (hsMSTN-1, hsMSTN-2, hsMSTN-3, and hsMSTN-4) were tested further in a dose response analysis described in Example 6.

### Example 6: Inhibiting MSTN with Candidate Oligonucleotides

[0933] To evaluate candidate oligonucleotides for inhibiting human MSTN, siRNAs were screened in a dual luciferase reporter assay. A dose response analysis was conducted over 10 concentrations of each siRNA, from 100 nM to 10 fM, with a fold change of 6 between each dose. Gene inhibition results were used to calculate IC50 and IC80 values for each oligonucleotide. FIG. 6 shows dose response curves for inhibition of MSTN and Table 42 shows the corresponding IC50 and IC80 values.

TABLE 42
Oligonucleotide inhibition of human MSTN

| | | | SEQ | | SEQ | | |
|---|---|---|---|---|---|---|---|
| | | Sense Sequence | ID | Antisense Sequence | ID | IC50 | IC80 |
| Target | siRNA # | (5′ to 3′) | NO: | (5′ to 3′) | NO: | (pM) | (pM) |
| Human | hsMSTN-1* | mUmCfUmUfUmGfGm | 173 | fAfUmAfAmUfCmGfUm | 197 | 84 | 597 |
| MSTN | | AfAmGfAmUfGmAfCm | | CfAmUfCmUfUmCfCm | | | |
| | | GfAmUfUmAfU | | AfAmAfGmA*fG*mC | | | |
| | hsMSTN-2* | mGmAfAmGfAmUfGm | 175 | fAfGmCfGmUfGmAfUm | 199 | 120 | 902 |
| | | AfCmGfAmUfUmAfUm | | AfAmUfCmGfUmCfAm | | | |
| | | CfAmCfGmCfU | | UfCmUfUmC*fC*mA | | | |
| | hsMSTN-3* | mGmAfCmAfGmUfGm | 184 | fAfGmCfCmAfAmUfUm | 208 | 101 | 979 |
| | | UfUmGfCmAfAmAfAm | | UfUmGfCmAfAmCfAm | | | |
| | | UfUmGfGmCfU | | CfUmGfUmC*fU*mU | | | |
| | hsMSTN-4* | mGmUfGmUfUmGfCm | 185 | fUfUmUfGmAfGmCfCm | 209 | 122 | 948 |
| | | AfAmAfAmUfUmGfGm | | AfAmUfUmU UmGfCm | | | |
| | | CfUmCfAmAfA | | AfAmCfAmC*fU*mG | | | |

*Oligonucleotide designed to have cross-species activity
‘mN’ represents a 2′-O-methyl modified nucleoside (e.g., mU is 2′-O-methyl modified uridine), ′fN′ represents a 2′-fluoro modified nucleoside (e.g., fU is 2′-fluoro modified uridine), “*′ represents a phosphorothioate internucleoside linkage, and lack of “*” between nucleosides indicate phosphodiester internucleoside linkage.

### Example 7: Screening INHBA Candidate siRNAs

[0934] To identify candidate oligonucleotides for inhibiting INHBA, siRNAs were screened for suppression of INHBA expression. Cells were treated with 0.1 nM or 10 nM of each siRNA and gene expression was measured. Each siRNA was designed to have cross-species activity. FIG. 7 shows INHBA gene expression data for each of the 24 siRNAs tested at both doses. Three siRNAs (hsINHBA-1, hsINHBA-2, and hsINHBA-3) from this screen were tested further in a dose response analysis described in Example 8.

### Example 8: Inhibiting INHBA with Candidate Oligonucleotides

[0935] To evaluate candidate oligonucleotides for inhibiting human INHBA, siRNAs were screened in a dual luciferase reporter assay. A dose response analysis was conducted over 10 concentrations of each siRNA, from 100 nM to 10 fM, with a fold change of 6 between each dose. Gene inhibition results were used to calculate IC50 and IC80 values for each oligonucleotide. FIG. 8 shows dose response curves for inhibition of INHBA and Table 43 shows the corresponding IC50 and IC80 values.

TABLE 43
Oligonucleotide inhibition of human INHBA

| | | | | | SEQ | | |
|---|---|---|---|---|---|---|---|
| | | Sense Sequence | SEQ ID | Antisense Sequence | ID | IC50 | IC80 |
| Target | siRNA # | (5′ to 3′) | NO: | (5′ to 3′) | NO | (pM) | (pM) |
| Human | hsINHBA-1* | mGmGfCmAfAmGfUm | 304 | fAfCmUfAmUfAmAfUmCfC | 328 | 315 | 5674 |
| INHBA | | UfGmCfUmGfGmAfU | | mAfGmCfAmAfCmUfUmGf | | | |
| | | mUfAmUfAmGfU | | CmC*fA*mA | | | |
| | hsINHBA-2* | mAmAfGmUfUmGfCm | 305 | fCfUmCfAmCfUmAfUmAfA | 329 | 117 | 4801 |
| | | UfGmGfAmUfUmAfU | | mUfCmCfAmGfCmAfAmCf | | | |
| | | mAfGmUfGmAfG | | UmU*fG*mC | | | |
| | hsINHBA-3* | mCmUfGmCfUmGfUm | 315 | fAfAmGfAmAfCmUfGmUfU | 339 | 238 | 12679 |
| | | AfAmGfAmAfAmCfA | | mUfCmUfUmAfCmAfGmCf | | | |
| | | mGfUmUfCmUfU | | AmG*fA*mU | | | |

*Oligonucleotide designed to have cross-species activity
′mN′ represents a 2′-O-methyl modified nucleoside (e.g., mU is 2′-O-methyl modified uridine), ′fN′ represents a 2′-fluoro modified nucleoside (e.g., fU is 2′-fluoro modified uridine), “*′ represents a phosphorothioate internucleoside linkage, and lack of “*” between nucleosides indicate phosphodiester internucleoside linkage.

### Example 9: Screening ACVR1B Candidate siRNAs

[0936] To identify candidate oligonucleotides for inhibiting ACVR1B, siRNAs were screened for suppression of ACVR1B expression. Cells were treated with 0.1 nM or 10 nM of each siRNA and gene expression was measured. Each siRNA was designed to have cross-species activity, activity against human and cynomolgus sequences, or activity against rat and mouse sequences. FIG. 9 shows ACVR1B gene expression data for each of the 24 siRNAs tested at both doses. Five siRNAs from this screen (hsACVR1B-1 and hsACVR1B-2; and mmACVR1B-1, mmACVR1B-2 and mmACVR1B-3) were tested further in a dose response analysis described in Example 10.

### Example 10: Inhibiting ACVR1B with Candidate Oligonucleotides

[0937] To evaluate candidate oligonucleotides for inhibiting human and murine ACVR1B, siRNAs were screened in a dual luciferase reporter assay. A dose response analysis was conducted over 10 concentrations of each siRNA, from 100 nM to 10 fM, with a fold change of 6 between each dose. Gene inhibition results were used to calculate IC50 and IC80 values for each oligonucleotide. FIGS. 10 (human) and 11 (murine) show dose response curves for inhibition of ACVR1B and Tables 44 (human) and 45 (murine) show the corresponding IC50 and IC80 values.

TABLE 44
Oligonucleotide inhibition of human ACVR1B

| | | Sense | SEQ | Antisense | SEQ | | |
|---|---|---|---|---|---|---|---|
| | | Sequence | ID | Sequence | ID | IC50 | IC80 |
| Target | siRNA # | (5′ to 3′) | NO: | (5′ to 3′) | NO: | (pM) | (pM) |
| Human | hsACVRIB-1 | mCmUfCmCfAmGfG | 253 | fAfUmCfGmUfAmGfA | 351 | 272 | # |
| ACVR1B | | mAfUmCfUmUfGmU | | mCfAmAfGmAfUmCfC | | | |
| | | fCmUfAmCfGmAfU | | mUfGmGfAmG*fC*mG | | | |
| | hsACVR1B-2 | mCmAfUmCfAmUfU | 257 | fAfUmGfAmCfAmAfG | 355 | 53 | 273 |
| | | mGfUmUfUmUfCmC | | mGfAmAfAmAfCmAfA | | | |
| | | fUmUfGmUfCmAfU | | mUfGmAfUmG*fA*mU | | | |

# Inhibition did not reach 80% or greater at highest concentration tested (100 nM)
‘mN’ represents a 2′-O-methyl modified nucleoside (e.g., mU is 2′-O-methyl modified uridine),
‘fN’ represents a 2′-fluoro modified nucleoside (e.g., fU is 2′-fluoro modified uridine),
‘*’ represents a phosphorothioate internucleoside linkage, and lack of “*” between nucleosides indicate phosphodiester internucleoside linkage.

TABLE 45
Oligonucleotide inhibition of murine ACVR1B

| | | Sense | SEQ | Antisense | SEQ | | |
|---|---|---|---|---|---|---|---|
| | | Sequence | ID | Sequence | ID | IC₅₀ | IC₈₀ |
| Target | siRNA # | (5′ to 3′) | NO: | (5′ to 3′) | NO: | (pM) | (pM) |
| Murine | mmACVR1B-1 | mCmAfCmAfCmUfG | 264 | fAfGmUfCmAfAmUfAm | 362 | 247 | # |
| ACVR1B | | mCfUmGfCmUfAmU | | UfAmGfCmAfGmCfAmG | | | |
| | | fAmUfUmGfAmCfU | | fUmGfUmG*fU*mG | | | |
| | mmACVR1B-2 | mGmGfUmCfUmCfC | 265 | fUfCmCfAmGfGmUfUm | 363 | 754 | # |
| | | mAfUmCfUmUfUmA | | AfAmAfGmAfUmGfGmA | | | |
| | | fAmCfCmUfGmGfA | | fGmAfCmC*fA*mU | | | |
| | mmACVR1B-3 | mAmCfAmAfGmAfG | 268 | fCfCmCfUmUfGmCfCm | 366 | 1140 | # |
| | | mAfUmUfAmUfCmG | | GfAmUfAmAfUmCfUmC | | | |
| | | fGmCfAmAfGmGfG | | fUmUfGmU*fA*mA | | | |

# Inhibition did not reach 80% or greater at highest concentration tested (100 nM)
‘mN’ represents a 2′-O-methyl modified nucleoside (e.g., mU is 2′-O-methyl modified uridine),
‘fN’ represents a 2′-fluoro modified nucleoside (e.g., fU is 2′-fluoro modified uridine),
‘*’ represents a phosphorothioate internucleoside linkage, and lack of “*” between nucleosides indicate phosphodiester internucleoside linkage.

### Example 11: Targeting MLCK1 with a Muscle-Targeting Complex

[0938] A muscle-targeting complex is generated comprising an antisense oligonucleotide that targets a mutant allele of MLCK1 covalently linked, via a cathepsin cleavable linker, to DTX-A-002 (RI7 217 Fab), an anti-transferrin receptor 1 antibody.

[0939] Briefly, a maleimidocaproyl-L-valine-L-citrulline-p-aminobenzyl alcohol p-nitrophenyl carbonate (MC-Val-Cit-PABC-PNP) linker molecule is coupled to NH₂—C₆-MLCK1 ASO using an amide coupling reaction. Excess linker and organic solvents are removed by gel permeation chromatography. The purified Val-Cit-linker-MLCK1 ASO is then coupled to a thiol on the anti-transferrin receptor 1 antibody (DTX-A-002).

[0940] The product of the antibody coupling reaction is then subjected to hydrophobic interaction chromatography (HIC-HPLC) to purify the muscle-targeting complex. Densitometry and SDS-PAGE analysis of the purified complex allow for determination of the average ratio of ASO-to-antibody and total purity, respectively.

[0941] Using the same methods as described above, a control complex is generated comprising MLCK1 ASO covalently linked via a Val-Cit linker to an IgG2a (Fab) antibody.

[0942] The purified muscle-targeting complex comprising DTX-A-002 covalently linked to MLCK1 ASO is then tested for cellular internalization and inhibition of MLCK1. Disease-relevant muscle cells that have relatively high expression levels of transferrin receptor, are incubated in the presence of vehicle control (saline), muscle-targeting complex (100 nM), or control complex (100 nM) for 72 hours. After the 72 hour incubation, the cells are isolated and assayed for expression levels of MLCK1.

### Example 12: Targeting ACVR1 with a Muscle-Targeting Complex

[0943] A muscle-targeting complex is generated comprising an antisense oligonucleotide that targets a mutant allele of ACVR1 (ACVR1 ASO) covalently linked, via a cathepsin cleavable linker, to DTX-A-002 (RI7 217 Fab), an anti-transferrin receptor 1 antibody.

[0944] Briefly, a maleimidocaproyl-L-valine-L-citrulline-p-aminobenzyl alcohol p-nitrophenyl carbonate (MC-Val-Cit-PABC-PNP) linker molecule is coupled to NH₂—C₆-ACVR1 ASO using an amide coupling reaction. Excess linker and organic solvents are removed by gel permeation chromatography. The purified Val-Cit-linker-ACVR1 ASO is then coupled to a thiol on the anti-transferrin receptor 1 antibody (DTX-A-002).

[0945] The product of the antibody coupling reaction is then subjected to hydrophobic interaction chromatography (HIC-HPLC) to purify the muscle-targeting complex. Densitometry and SDS-PAGE analysis of the purified complex allow for determination of the average ratio of ASO-to-antibody and total purity, respectively.

[0946] Using the same methods as described above, a control complex is generated comprising ACVR1 ASO covalently linked via a Val-Cit linker to an IgG2a (Fab) antibody.

[0947] The purified muscle-targeting complex comprising DTX-A-002 covalently linked to ACVR1 ASO is then tested for cellular internalization and inhibition of ACVR1. Disease-relevant muscle cells that have relatively high expression levels of transferrin receptor, are incubated in the presence of vehicle control (saline), muscle-targeting complex (100 nM), or control complex (100 nM) for 72 hours. After the 72 hour incubation, the cells are isolated and assayed for expression analysis of ACVR1.

### Example 13: Knockdown of ACVR1 Expression with Candidate Oligonucleotides

[0948] To identify lead oligonucleotide candidates, a panel of oligonucleotide complexes generated to target ACVR1 were screened for knockdown of ACVR1 expression in cell culture. Expression knockdown was assayed at 10 nM and 0.5 nM. All assayed ACVR siRNA oligonucleotides were generated with cross-species specificity (i.e., expected to target both human/cynomolgus and mouse/rat ACVR1 based on sequence similarity) and tested against human ACVR1. Candidate oligonucleotides exhibiting the greatest reduction in target expression were subsequently selected for further dose response analysis. FIG. 12 shows ACVR1 expression knockdown for screened oligonucleotides.

### Example 14: Inhibiting ACVR1 with Candidate Oligonucleotides

[0949] To evaluate candidate oligonucleotides for inhibiting human ACVR1, siRNAs were screened in a dual luciferase reporter assay. A dose response analysis was conducted over 10 concentrations of each siRNA, from 100 nM to 10 NM, with a fold change of 6 between each dose. Gene inhibition results were used to calculate IC₅₀ and IC₈₀ values for each oligonucleotide. FIG. 13 shows dose response curves for inhibition of ACVR1 and Table 46 shows the corresponding IC₅₀ and IC₈₀ values.

TABLE 46
Oligonucleotice inhibition of human ACVRI

| | | | SEQ | | SEQ | | |
|---|---|---|---|---|---|---|---|
| | | Sense | ID | Antisense | ID | IC₅₀ | IC₈₀ |
| Target | siRNA # | Sequence | NO: | Sequence | NO: | (pM) | (pM) |
| Human | hsACVR1-1* | mAmGfCmAfAmAf | 473 | fAfAmUfUmCfUm | 497 | 95 | 484 |
| ACVR1 | | GmAfUmUfUmCfA | | AfCmUfGmAfAmA | | | |
| | | mGfUmAfGmAfAm | | fUmCfUmUfUmGf | | | |
| | | UfU | | CmU*fU*mC | | | |
| | hsACVR1-3* | mAmAfGmCfAmAf | 472 | fAfUmUfCmUfAm | 496 | 123 | 694 |
| | | AmGfAmUfUmUfC | | CfUmGfAmAfAmU | | | |
| | | mAfGmUfAmGfAm | | fCmUfUmUfGmCf | | | |
| | | AfU | | UmU*fC*mU | | | |
| | hsACVR1-4* | mGmAfAmGfCmAf | 471 | fUfUmCfUmAfCm | 495 | 57 | 295 |
| | | AmAfGmAfUmUfU | | UfGmAfAmAfUmC | | | |
| | | mCfAmGfUmAfGm | | fUmUfUmGfCmUf | | | |
| | | AfA | | UmC*fU*mA | | | |
| | hsACVR1-6* | mCmUfUmUfGmCf | 465 | fAfGmUfAmAfUm | 489 | 19 | 99 |
| | | AmAfAmUfUmAfU | | AfAmAfUmAfAmU | | | |
| | | mUfUmAfUmUfAm | | fUmUfGmCfAmAf | | | |
| | | CfU | | AmG*fU*mU | | | |
| | hsACVR1-8* | mCmAfUmUfUmUf | 466 | fAfAmCfUmGfAm | 490 | 46 | 178 |
| | | CmUfUmUfUmAfU | | UfAmAfUmAfAmA | | | |
| | | mUfAmUfCmAfGm | | fAmGfAmAfAmAf | | | |
| | | UfU | | UmG*fU*mC | | | |

*Oligonucleotide designed to have cross-species activity
‘mN’ represents a 2′-O-methyl modified nucleoside (e.g., mU is 2′-O-methyl modified uridine),
‘fN’ represents a 2′-fluoro modified nucleoside (e.g., fU is 2′-fluoro modified uridine),
‘*’ represents a phosphorothioate internucleoside linkage, and lack of “*” between nucleosides indicate phosphodiester internucleoside linkage.

### Example 15: Targeting FBXO32 with a Muscle-Targeting Complex

[0950] A muscle-targeting complex is generated comprising an antisense oligonucleotide that targets an allele of FBXO32 (FBXO32 ASO) covalently linked, via a cathepsin cleavable linker, to DTX-A-002 (RI7 217 (Fab)), an anti-transferrin receptor 1 antibody.

[0951] Briefly, a maleimidocaproyl-L-valine-L-citrulline-p-aminobenzyl alcohol p-nitrophenyl carbonate (MC-Val-Cit-PABC-PNP) linker molecule is coupled to NH₂-C₆-FBXO32 ASO using an amide coupling reaction. Excess linker and organic solvents are removed by gel permeation chromatography. The purified Val-Cit-linker-FBXO32 ASO is then coupled to a thiol on the anti-transferrin receptor 1 antibody (DTX-A-002).

[0952] The product of the antibody coupling reaction is then subjected to hydrophobic interaction chromatography (HIC-HPLC) to purify the muscle-targeting complex. Densitometry and SDS-PAGE analysis of the purified complex allow for determination of the average ratio of ASO-to-antibody and total purity, respectively.

[0953] Using the same methods as described above, a control complex is generated comprising FBXO32 ASO covalently linked via a Val-Cit linker to an IgG2a (Fab) antibody. The purified muscle-targeting complex comprising DTX-A-002 covalently linked to FBXO32 ASO is then tested for cellular internalization and inhibition of FBXO32. Disease-relevant muscle cells that have relatively high expression levels of transferrin receptor, are incubated in the presence of vehicle control (saline), muscle-targeting complex (100 nM), or control complex (100 nM) for 72 hours. After the 72 hour incubation, the cells are isolated and assayed for expression levels of FBXO32.

### Example 16: Targeting TRIM63 with a Muscle-Targeting Complex

[0954] A muscle-targeting complex is generated comprising an antisense oligonucleotide that targets an allele of TRIM63 (TRIM63 ASO) covalently linked, via a cathepsin cleavable linker, to DTX-A-002 (RI7 217 (Fab)), an anti-transferrin receptor 1 antibody.

[0955] Briefly, a maleimidocaproyl-L-valine-L-citrulline-p-aminobenzyl alcohol p-nitrophenyl carbonate (MC-Val-Cit-PABC-PNP) linker molecule is coupled to NH₂—C₆-TRIM63 ASO using an amide coupling reaction. Excess linker and organic solvents are removed by gel permeation chromatography. The purified Val-Cit-linker-TRIM63 ASO is then coupled to a thiol on the anti-transferrin receptor 1 antibody (DTX-A-002).

[0956] The product of the antibody coupling reaction is then subjected to hydrophobic interaction chromatography (HIC-HPLC) to purify the muscle-targeting complex. Densitometry and SDS-PAGE analysis of the purified complex allow for determination of the average ratio of ASO-to-antibody and total purity, respectively.

[0957] Using the same methods as described above, a control complex is generated comprising TRIM63 ASO covalently linked via a Val-Cit linker to an IgG2a (Fab) antibody.

[0958] The purified muscle-targeting complex comprising DTX-A-002 covalently linked to TRIM63 ASO is then tested for cellular internalization and inhibition of TRIM63. Disease-relevant muscle cells that have relatively high expression levels of transferrin receptor, are incubated in the presence of vehicle control (saline), muscle-targeting complex (100 nM), or control complex (100 nM) for 72 hours. After the 72 hour incubation, the cells are isolated and assayed for expression levels of TRIM63.

### Example 17. Identification of Candidate Oligonucleotides for Inhibiting Human and Murine FBXO32

[0959] To identify candidate oligonucleotides for inhibiting human, cynomolgus primate, and murine FBXO32, siRNA molecules were screened in a dual luciferase reporter assay. Candidate siRNA molecules were evaluated at a concentration of 0.1 nM and a concentration of 10 nM. Gene inhibition results were used to identify candidate siRNA molecules for further evaluation. FIG. 14 shows percent of target gene expression remaining following treatment with candidate siRNA molecules at a concentration of either 0.1 nM or 10 nM.

### Example 18. Identification of Candidate Oligonucleotides for Inhibiting Human and Murine TRIM63

[0960] To identify candidate oligonucleotides for inhibiting human, cynomolgus primate, and murine TRIM63, siRNA molecules were screened in a dual luciferase reporter assay. Candidate siRNA molecules were evaluated at a concentration of 0.1 nM and a concentration of 10 nM. Gene inhibition results were used to identify candidate siRNA molecules for further evaluation. FIG. 15 shows percent of target gene expression remaining following treatment with candidate siRNA molecules at a concentration of either 0.1 nM or 10 nM.

### Example 19. Oligonucleotide Inhibition of FBXO32

[0961] To evaluate candidate oligonucleotides for inhibiting human and murine FBXO32, siRNAs were screened in a dual luciferase reporter assay. A dose response analysis was conducted over 10 concentrations of each siRNA, from 100 nM to 10 fM, with a fold change of 6 between each dose. Gene inhibition results were used to calculate IC₅₀ and IC₈₀ values for each oligonucleotide. FIGS. 16A (human) and 16B (murine) show dose response curves for inhibition of FBXO32 and Tables 47 (human) and 48 (murine) show the corresponding IC₅₀ and IC₈₀ values.

TABLE 47
Oligonucleotide inhibition of human FBXO32

| | | Sense | Antisense | | |
|---|---|---|---|---|---|
| | | Sequence | Sequence | IC₅₀ | IC₈₀ |
| Target | siRNA # | (5′ to 3′) | (5′ to 3′) | (pM) | (pM) |
| Human | hsFBXO32-1 | mAmGfCmUfGmGfAmUf | fAfCmAfUmCfUmUfCm | 105 | 1792 |
| FBXO32 | | UmGfGmAfAmGfAmAfG | UfUmCfCmAfAmUfCmC | | |
| | | mAfUmGfU (SEQ ID | fAmGfCmU*fG*mC | | |
| | | NO: 531) | (SEQ ID NO: 555) | | |
| | hsFBXO32-3 | mGmCfUmGfGmAfUmUf | fUfAmCfAmUfCmUfUm | 68 | 622 |
| | | GmGfAmAfGmAfAmGfA | CfUmUfCmCfAmAfUmC | | |
| | | mUfGmUfA(SEQ ID | fCmAfGmC*fU*mG | | |
| | | NO: 533) | (SEQ ID NO: 557) | | |

+ Oligonucleotide designed to have cross-species activity,
‘mN’ represents a 2′-O-methyl modified nucleoside (e.g., mU is 2′-O-methyl modified uridine),
‘fN’ represents a 2′-fluoro modified nucleoside (e.g., fU is 2′-fluoro modified uridine),
‘*’ represents a phosphorothioate internucleoside linkage, and lack of “*” between nucleosides indicate phosphodiester internucleoside linkage.

TABLE 48
Oligonucleotide inhibition of murine FBXO32

| | | Sense | Antisense | | |
|---|---|---|---|---|---|
| | | Sequence | Sequence | IC₅₀ | IC₈₀ |
| Target | siRNA # | (5′ to 3′) | (5′ to 3′) | (pM) | (pM) |
| Murine | mmFBXO32-5 | mUmUfCmCfAmGf | fAfCmGfUmAfGmUfU | 69 | 538 |
| FBXO32 | | AmAfGmAfUmUfC | mGfAmAfUmCfUmUfC | | |
| | | mAfAmCfUmAfCm | mUfGmGfAmA*fU*mC | | |
| | | GfU (SEQ ID | (SEQ ID NO: 574) | | |
| | | NO: 550) | | | |

+ Oligonucleotide designed to have cross-species activity,
wherein ‘mN’ represents a 2′-O-methyl modified nucleoside (e.g., mU is 2′-O-methyl modified uridine),
‘fN’ represents a 2′-fluoro modified nucleoside (e.g., fU is 2′-fluoro modified uridine),
‘*’ represents a phosphorothioate internucleoside linkage, and lack of “*” between nucleosides indicate phosphodiester internucleoside linkage.

### Example 20. Oligonucleotide Inhibition of TRIM63

[0962] To evaluate candidate oligonucleotides for inhibiting human and murine TRIM63, siRNAs were screened in a dual luciferase reporter assay. A dose response analysis was conducted over 10 concentrations of each siRNA, from 100 nM to 10 fM, with a fold change of 6 between each dose. Gene inhibition results were used to calculate IC₅₀ and IC₈₀ values for each oligonucleotide. FIGS. 17A (human) and 17B (murine) show dose response curves for inhibition of TRIM63 and Tables 49 (human) and 50 (murine) show the corresponding IC₅₀ and IC₈₀ values.

TABLE 49
Oligonucleotide inhibition of human TRIM63

| | | Sense | Antisense | | |
|---|---|---|---|---|---|
| | | Sequence | Sequence | IC₅₀ | IC₈₀ |
| Target | siRNA# | (5′ to 3′) | (5′ to 3′) | (pM) | (pM) |
| Human | hsTRIM63-4 | mUmGfAmGfUmUfUm | fAfCmAfAmCfAmUfAm | 45 | 332 |
| TRIM63 | | GfUmGfUmUfAmUfA | UfAmAfCmAfCmAfAmA | | |
| | | UfGmUfmUmGfU | fCmUfCmA*fG*mU | | |
| | | (SEQ ID NO: 608) | (SEQ ID NO: 632) | | |
| | hsTRIM63-5 | mGmUfAmAfAmGfGm | fAfUmUfAmUfAmCfAm | 88 | 686 |
| | | AfAmCfUmUfUmUfG | AfAmAfGmUfUmCfCmU | | |
| | | mUfAmUfAmAfU | fUmUfAmC*fA*mA | | |
| | | (SEQ ID NO: 609) | (SEQ ID NO: 633) | | |

+ Oligonucleotide designed to have cross-species activity,
‘mN’ represents a 2′-O-methyl modified nucleoside (e.g., mU is 2′-O-methyl modified uridine),
‘fN’ represents a 2′-fluoro modified nucleoside (e.g., fU is 2′-fluoro modified uridine),
‘*’ represents a phosphorothioate internucleoside linkage, and lack of “*” between nucleosides indicate phosphodiester internucleoside linkage.

TABLE 50
Oligonucleotide inhibition of murine TRIM63

| | | Sense | Antisense | | |
|---|---|---|---|---|---|
| | | Sequence | Sequence | IC₅₀ | IC₈₀ |
| Target | siRNA # | (5′ to 3′) | (5′ to 3′) | (pM) | (pM) |
| Murine | mmTRIM63-1 | mUmGfAmAfUmUfU | fAfCmAfAmCfAmUfA | 24 | 169 |
| TRIM63 | | mGfUmGfUmUfAmU | mUfAmAfCmAfCmAfA | | |
| | | fAmUfGmUfUmGfU | mAfUmUfCmA*fG*mU | | |
| | | (SEQ ID NO: | (SEQ ID NO: 642) | | |
| | | 618) | | | |
| | mmTRIM63-2 | mAmGfGmAfCmUfG | fAfUmAfUmAfAmCfA | 51 | 367 |
| | | mAfAmUfUmUfGmU | mCfAmAfAmUfUmCfA | | |
| | | fGmUfUmAfUmAfU | mGfUmCfCmU*fA*mU | | |
| | | (SEQ ID NO: | (SEQ ID NO: 643) | | |
| | | 619) | | | |
| | mmTRIM63-6 | mAmUfAmGfGmAfC | fAfU mAfAmCfAmCf | 84 | 1093 |
| | | mUfGmAfAmUfUmU | AmAfAmUfUmCfAmGf | | |
| | | fGmUfGmUfUmAfU | UmCfCmUfAmU*fC*m | | |
| | | (SEQ ID NO: | C (SEQ ID NO: | | |
| | | 623) | 647) | | |

+ Oligonucleotide designed to have cross-species activity,
wherein ‘mN’ represents a 2′-O-methyl modified nucleoside (e.g., mU is 2′-O-methyl modified uridine),
‘fN’ represents a 2′-fluoro modified nucleoside (e.g., fU is 2′-fluoro modified uridine),
‘*’ represents a phosphorothioate internucleoside linkage, and lack of “*” between nucleosides indicate phosphodiester internucleoside linkage.

### Example 21: Targeting Genes Associated with Heart Disease with a Muscle-Targeting Complex

[0963] Muscle-targeting complexes are generated that each comprise an antisense oligonucleotide (ASO) that targets MEF2D, KLF15, MED1, MED13, or PPP1R3A that is covalently linked, via a cathepsin cleavable linker, to DTX-A-002 (RI7 217 Fab), an anti-transferrin receptor 1 antibody. A muscle-targeting complex that targets KLF15 is generated comprising a guide RNA (gRNA) oligonucleotide. A muscle-targeting complex that targets MED13 targets a mutant allele of MED13. A muscle-targeting complex that targets PPP1R3A is generated comprising an siRNA oligonucleotide.

[0964] Briefly, a maleimidocaproyl-L-valine-L-citrulline-p-aminobenzyl alcohol p-nitrophenyl carbonate (MC-Val-Cit-PABC-PNP) linker molecule is coupled to NH₂—C₆-MEF2D ASO, NH₂—C₆-KLF15 ASO, NH₂—C₆-MED1 ASO, NH₂—C₆-MED13 ASO, or NH₂—C₆-PPP1R3A ASO using an amide coupling reaction. Excess linker and organic solvents are removed by gel permeation chromatography. The purified Val-Cit-linker-MEF2D ASO, Val-Cit-linker-KLF15 ASO, Val-Cit-linker-MED1 ASO, Val-Cit-linker-MED13 ASO, or Val-Cit-linker-PPP1R3A ASO is then coupled to a thiol on the anti-transferrin receptor 1 antibody (DTX-A-002).

[0965] The product of the antibody coupling reaction is then subjected to hydrophobic interaction chromatography (HIC-HPLC) to purify the muscle-targeting complex. Densitometry and SDS-PAGE analysis of the purified complex allow for determination of the average ratio of ASO-to-antibody and total purity, respectively.

[0966] Using the same methods as described above, a control complex is generated comprising the oligonucleotide covalently linked via a Val-Cit linker to an IgG2a (Fab) antibody. The purified muscle-targeting complex comprising DTX-A-002 covalently linked to MEF2D ASO is then tested for cellular internalization and either inhibition of MEF2D, enhancement of KLF15 expression and/or function, enhanced expression of MED1, inhibition of MED13, or inhibition of PPP1R3A expression. Disease-relevant muscle cells that have relatively high expression levels of transferrin receptor, are incubated in the presence of vehicle control (saline), muscle-targeting complex (100 nM), or control complex (100 nM) for 72 hours. After the 72 hour incubation, the cells are isolated and assayed for expression levels of MEF2D, KLF15, MED1, MED13, or PPP1R3A.

### Example 22: Knockdown of MEF2D Expression with Candidate Oligonucleotides

[0967] To identify lead oligonucleotide candidates, a panel of oligonucleotide complexes generated to target MEF2D were screened for knockdown of MEF2D expression in cell culture. Expression knockdown was assayed at 10 nM and 0.1 nM. Assayed MEF2D siRNA oligonucleotides were generated with cross-species specificity (i.e., expected to target both human/cynomolgus and mouse/rat MEF2D based on sequence similarity) or specificity for either human/cynomolgus or mouse/rat MEF2D and tested against human or murine MEF2D as appropriate. Candidate oligonucleotides exhibiting the greatest reduction in target expression were subsequently selected for further dose response analysis. FIG. 18 shows MEF2D expression knockdown for screened oligonucleotides.

### Example 23: Knockdown of KLF15 Expression with Candidate Oligonucleotides

[0968] To identify lead oligonucleotide candidates, a panel of oligonucleotide complexes generated to target KLF15 were screened for knockdown of KLF15 expression in cell culture. Expression knockdown was assayed at 10 nM and 0.1 nM. Assayed KLF15 siRNA oligonucleotides were generated with cross-species specificity (i.e., expected to target both human/cynomolgus and mouse/rat KLF15 based on sequence similarity) or specificity for either human/cynomolgus or mouse/rat KLF15 and tested against human or murine KLF15 as appropriate. Candidate oligonucleotides exhibiting the greatest reduction in target expression were subsequently selected for further dose response analysis. FIG. 19 shows KLF15 expression knockdown for screened oligonucleotides.

### Example 24: Knockdown of MED1 Expression with Candidate Oligonucleotides

[0969] To identify lead oligonucleotide candidates, a panel of oligonucleotide complexes generated to target MED1 were screened for knockdown of MED1 expression in cell culture. Expression knockdown was assayed at 10 nM and 0.5 nM. All assayed MED1 siRNA oligonucleotides were generated with cross-species specificity (i.e., expected to target both human/cynomolgus and mouse/rat MED1 based on sequence similarity) and tested against human MED1. Candidate oligonucleotides exhibiting the greatest reduction in target expression were subsequently selected for further dose response analysis. FIG. 20 shows MED1 expression knockdown for screened oligonucleotides.

### Example 25: Knockdown of MED13 Expression with Candidate Oligonucleotides

[0970] To identify lead oligonucleotide candidates, a panel of oligonucleotide complexes generated to target MED13 were screened for knockdown of MED13 expression in cell culture. Expression knockdown was assayed at 10 nM and 0.1 nM. All assayed MED13 siRNA oligonucleotides were generated with cross-species specificity (i.e., expected to target both human/cynomolgus and mouse/rat MED13 based on sequence similarity) and tested against human MED13. Candidate oligonucleotides exhibiting the greatest reduction in target expression were subsequently selected for further dose response analysis. FIG. 21 shows MED13 expression knockdown for screened oligonucleotides.

### Example 26: Knockdown of PPP1R3A Expression with Candidate Oligonucleotides

[0971] To identify lead oligonucleotide candidates, a panel of oligonucleotide complexes generated to target PPP1R3A were screened for knockdown of PPP1R3A expression in cell culture. Expression knockdown was assayed at 10 nM and 0.5 nM. Assayed PPP1R3A siRNA oligonucleotides were generated with cross-species specificity (i.e., expected to target both human/cynomolgus and mouse/rat PPP1R3A based on sequence similarity) or specificity for either human/cynomolgus or mouse/rat PPP1R3A and tested against human or murine PPP1R3A as appropriate. Candidate oligonucleotides exhibiting the greatest reduction in target expression were subsequently selected for further dose response analysis. FIG. 22 shows PPP1R3A expression knockdown for screened oligonucleotides.

### Example 27: Inhibiting MEF2D with Candidate Oligonucleotides

[0972] To evaluate candidate oligonucleotides for inhibiting human and murine MEF2D, siRNAs were screened in a dual luciferase reporter assay. A dose response analysis was conducted over 10 concentrations of each siRNA, from 100 nM to 10 fM, with a fold change of 6 between each dose. Gene inhibition results were used to calculate IC₅₀ and IC₈₀ values for each oligonucleotide. FIGS. 23A (human) and 23B (murine) show dose response curves for inhibition of MEF2D and Tables 51 (human) and 52 (murine) show the corresponding IC₅₀ values.

TABLE 51
Oligonucleotide inhibition of human MEF2D

| | | | SEQ | | SEQ | | |
|---|---|---|---|---|---|---|---|
| | | Sense | ID | Antisense | ID | IC₅₀ | IC₈₀ |
| Target | siRNA # | Sequence | NO: | Sequence | NO: | (pM) | (pM) |
| Human | hsMEF2D-3* | mUmGfCmCfUmAfC | 694 | fUfGmGfUmAfAmU | 718 | 1016 | # |
| MEF2D | | mAfAmCfAmCfAmG | | fCmUfGmUfGmUfU | | | |
| | | fAmUfUmAfCmCfA | | mGfUmAfGmGfCmA | | | |
| | | | | *fG*mU | | | |
| | hsMEF2D-4* | mUmGfAmUfGmAfA | 695 | fGfAmGfAmUfUmG | 719 | 418 | # |
| | | mGfAmGfUmUfGmA | | fUmCfAmAfCmUfC | | | |
| | | fCmAfAmUfCmUfC | | mUfUmCfAmUfCmA | | | |
| | | | | *fG*mG | | | |
| | hsMEF2D-15 | mAmCfAmAfCmAfC | 706 | fUfCmAfAmCfUmG | 730 | 895 | # |
| | | mAfGmAfUmUfAmC | | fGmUfAmAfUmCfU | | | |
| | | fCmAfGmUfUmGfA | | mGfUmGfUmUfGmU | | | |
| | | | | *fA*mG | | | |

*Oligonucleotide designed to have cross-species activity;
# Inhibition did not reach 80% or greater at highest concentration tested (100 nM)
‘mN’ represents a 2′-O-methyl modified nucleoside (e.g., mU is 2′-O-methyl modified uridine),
‘fN’ represents a 2′-fluoro modified nucleoside (e.g., fU is 2′-fluoro modified uridine),
‘*’ represents a phosphorothioate internucleoside linkage, and lack of “*” between nucleosides indicate phosphodiester internucleoside linkage

TABLE 52
Oligonucleotide inhibition of murine MEF2D

| | | | SEQ | | SEQ | | |
|---|---|---|---|---|---|---|---|
| | | Sense | ID | Antisense | ID | IC₅₀ | IC₈₀ |
| Target | siRNA # | Sequence | NO: | Sequence | NO: | (pM) | (pM) |
| Murine | mmMEF2D-2 | mCmCfAmUfGmCfA | 712 | fUfUmGfGmAfUmU | 736 | 149 | # |
| MEF2D | | mGfUmUfCmAfGmC | | fGmCfUmGfAmAfC | | | |
| | | fAmAfUmCfCmAfA | | mUfGmCfAmUfGmG | | | |
| | | | | *fA*mG | | | |
| | mmMEF2D-3 | mUmUfCmAfGmCfA | 713 | fAfGmAfGmCfUmA | 737 | 472 | # |
| | | mAfUmCfCmAfAmG | | fCmUfUmGfGmAfU | | | |
| | | fUmAfGmCfUmCfU | | mUfGmCfUmGfAmA | | | |
| | | | | *fC*mU | | | |
| | mmMEF2D-4 | mUmGfGmCfAmAfC | 714 | fUfGmAfGmUfAmA | 738 | 157 | # |
| | | mAfCmCfAmAfGmU | | fAmCfUmUfGmGfU | | | |
| | | fUmUfAmCfUmCfA | | mGfUmUfGmCfCmA | | | |
| | | | | *fC*mG | | | |

# Inhibition did not reach 80% or greater at highest concentration tested (100 nM)
‘mN’ represents a 2′-O-methyl modified nucleoside (e.g., mU is 2′-O-methyl modified uridine),
‘fN’ represents a 2′-fluoro modified nucleoside (e.g., fU is 2′-fluoro modified uridine),
‘*’ represents a phosphorothioate internucleoside linkage, and lack of “*” between nucleosides indicate phosphodiester internucleoside linkage

### Example 28: Inhibiting KLF15 with Candidate Oligonucleotides

[0973] To evaluate candidate oligonucleotides for inhibiting human and murine KLF15, siRNAs were screened in a dual luciferase reporter assay. A dose response analysis was conducted over 10 concentrations of each siRNA, from 100 nM to 10 fM, with a fold change of 6 between each dose. Gene inhibition results were used to calculate IC₅₀ and IC₈₀ values for each oligonucleotide. FIGS. 24A (human) and 24B (murine) show dose response curves for inhibition of KLF15 and Tables 53 (human) and 54 (murine) show the corresponding IC₅₀ and IC₈₀ values.

TABLE 53
Oligonucleotide inhibition of human KLF15

| | | | SEQ | | SEQ | | |
|---|---|---|---|---|---|---|---|
| | | Sense | ID | Antisense | ID | IC₅₀ | IC₈₀ |
| Target | siRNA # | Sequence | NO: | Sequence | NO: | (pM) | (pM) |
| Human | hsKLF15-6* | mCmGfUmAfUmAfU | 771 | fAfAmGfGmAfCmCf | 795 | 30 | 274 |
| KLF15 | | mUfUmUfCmUfUmU | | AmAfAmGfAmAfAmA | | | |
| | | fGmGfUmCfCmUfU | | fUmAfUmAfCmG*fU | | | |
| | | | | *mA | | | |
| | hsKLF15-7* | mAmAfUmAfUmAfU | 772 | fUfAmUfUmGfGmCf | 796 | 42 | # |
| | | mUfUmAfCmUfUmU | | AmAfAmGfUmAfAmA | | | |
| | | fGmCfCmAfAmUfA | | fUmAfUmAfUmU*fU | | | |
| | | | | *mU | | | |
| | hsKLF15-10 | mAmAfGmCfAmAfU | 775 | fGfAmGfGmCfAmAf | 799 | 162 | # |
| | | mAfAmUfUmUfAmU | | AmUfAmAfAmUfUmA | | | |
| | | fUmUfGmCfCmUfC | | fUmUfGmCfUmU*fA | | | |
| | | | | *mA | | | |

*Oligonucleotide designed to have cross-species activity;
# Inhibition did not reach 80% or greater at highest concentration tested (100 nM)
‘mN’ represents a 2′-O-methyl modified nucleoside (e.g., mU is 2′-O-methyl modified uridine),
‘fN’ represents a 2′-fluoro modified nucleoside (e.g., fU is 2′-fluoro modified uridine),
‘*’ represents a phosphorothioate internucleoside linkage, and lack of “*” between nucleosides indicate phosphodiester internucleoside linkage

TABLE 54
Oligonucleotide inhibition of murine KLF15

| | | | SEQ | | SEQ | | |
|---|---|---|---|---|---|---|---|
| | | Sense | ID | Antisense | ID | IC₅₀ | IC₈₀ |
| Target | siRNA # | Sequence | NO: | Sequence | NO: | (pM) | (pM) |
| Murine | mmKLF15-2 | mCmGfCmAfUmCfU | 782 | fAfAmGfAmUfAmU | 806 | 254 | # |
| KLF15 | | mAfCmAfUmAfAmA | | fUmUfUmAfUmGfU | | | |
| | | fAmUfAmUfCmUfU | | mAfGmAfUmGfCmG | | | |
| | | | | *fU*mA | | | |
| | mmKLF15-5 | mUmAfGmAfAmAfU | 785 | fUfUmCfAmAfUmU | 809 | 165 | # |
| | | mUfAmGfUmAfCmC | | fGmGfUmAfCmUfA | | | |
| | | fAmAfUmUfGmAfA | | mAfUmUfUmCfUmA | | | |
| | | | | *fG*mU | | | |
| | mmKLF15-7 | mAmCfAmCfGmUfU | 787 | fUfUmUfAmCfAmC | 811 | 293 | # |
| | | mGfAmCfAmUfUmU | | fAmAfAmUfGmUfC | | | |
| | | fGmUfGmUfAmAfA | | mAfAmCfGmUfGmU | | | |
| | | | | *fU*mA | | | |
| | mmKLF15-8 | mGmAfAmAfUmUfA | 788 | fAfGmUfUmCfAmA | 812 | 157 | # |
| | | mGfUmAfCmCfAmA | | fUmUfGmGfUmAfC | | | |
| | | fUmUfGmAfAmCfU | | mUfAmAfUmUfUmC | | | |
| | | | | *fU*mA | | | |

# Inhibition did not reach 80% or greater at highest concentration tested (100 nM)
‘mN’ represents a 2′-O-methyl modified nucleoside (e.g., mU is 2′-O-methyl modified uridine),
‘fN’ represents a 2′-fluoro modified nucleoside (e.g., fU is 2′-fluoro modified uridine),
‘*’ represents a phosphorothioate internucleoside linkage, and lack of “*” between nucleosides indicate phosphodiester internucleoside linkage

### Example 29: Inhibiting MED1 with Candidate Oligonucleotides

[0974] To evaluate candidate oligonucleotides for inhibiting human MED1, siRNAs were screened in a dual luciferase reporter assay. A dose response analysis was conducted over 10 concentrations of each siRNA, from 100 nM to 10 fM, with a fold change of 6 between each dose. Gene inhibition results were used to calculate IC50 and IC80 values for each oligonucleotide. FIG. 25 shows dose response curves for inhibition of MED1 and Table 55 shows the corresponding IC₅₀ and IC₈₀ values.

TABLE 55
Oligonucleotide inhibition of human MED1

| | | | SEQ | | SEQ | | |
|---|---|---|---|---|---|---|---|
| | | Sense | ID | Antisense | ID | IC₅₀ | IC₈₀ |
| Target | siRNA # | Sequence | NO: | Sequence | NO: | (pM) | (pM) |
| Human | hsMED1-1* | mAmUfGmUfUmAfC | 840 | fAfUmAfUmCfUmG | 864 | 338 | 3965 |
| MED1 | | mAfUmCfAmCfGmU | | fAmCfGmUfGmAfU | | | |
| | | fCmAfGmAfUmAfU | | mGfUmAfAmCfAmU | | | |
| | | | | *fU*mC | | | |
| | hsMED1-2* | mAmCfAmUfCmAfC | 841 | fAfGmAfAmCfAmU | 865 | 117 | 1001 |
| | | mGfUmCfAmGfAmU | | fAmUfCmUfGmAfC | | | |
| | | fAmUfGmUfUmCfU | | mGfUmGfAmUfGmU | | | |
| | | | | *fA*mA | | | |
| | hsMED1-3* | mGmUfCmAfGmAfU | 842 | fUfCmCfAmCfAmU | 866 | 187 | 1291 |
| | | mAfUmGfUmUfCmU | | fAmGfAmAfCmAfU | | | |
| | | fAmUfGmUfGmGfA | | mAfUmCfUmGfAmC | | | |
| | | | | *fG*mU | | | |

*Oligonucleotide designed to have cross-species activity
‘mN’ represents a 2′-O-methyl modified nucleoside (e.g., mU is 2′-O-methyl modified uridine),
‘fN’ represents a 2′-fluoro modified nucleoside (e.g., fU is 2′-fluoro modified uridine),
‘*’ represents a phosphorothioate internucleoside linkage, and lack of “*” between nucleosides indicate phosphodiester internucleoside linkage

### Example 30: Inhibiting MED13 with Candidate Oligonucleotides

[0975] To evaluate candidate oligonucleotides for inhibiting human MED13, siRNAs were screened in a dual luciferase reporter assay. A dose response analysis was conducted over 10 concentrations of each siRNA, from 100 nM to 10 fM, with a fold change of 6 between each dose. Gene inhibition results were used to calculate IC₅₀ and IC₈₀ values for each oligonucleotide. FIG. 26 shows dose response curves for inhibition of MED13 and Table 56 shows the corresponding IC₅₀ and IC₈₀ values.

TABLE 56
Oligonucleotide inhibition of human MED13

| | | | SEQ | | SEQ | | |
|---|---|---|---|---|---|---|---|
| | | Sense | ID | Antisense | ID | IC₅₀ | IC₈₀ |
| Target | siRNA # | Sequence | NO: | Sequence | NO: | (pM) | (pM) |
| Human | hsMED13-3* | mGmGfGmUfCmAfA | 916 | fAfUmAfCmUfGmA | 940 | 148 | # |
| MED13 | | mAfUmUfUmUfCmU | | fAmGfAmAfAmAfU | | | |
| | | fUmCfAmGfUmAfU | | mUfUmGfAmCfCmC | | | |
| | | | | *fA*mC | | | |
| | hsMED13-4* | mGmAfAmCfAmAfG | 917 | fAfUmCfAmAfUmU | 941 | 149 | 3245 |
| | | mAfAmCfCmUfAmA | | fUmUfAmGfGmUfU | | | |
| | | fAmAfUmUfGmAfU | | mCfUmUfGmUfUmC | | | |
| | | | | *fU*mG | | | |
| | hsMED13-11* | mUmCfAmAfCmAfA | 924 | fAfGmUfCmAfAmA | 948 | 53 | 318 |
| | | mAfUmAfUmUfGmU | | fAmCfAmAfUmAfU | | | |
| | | fUmUfUmGfAmCfU | | mUfUmGfUmUfGmA | | | |
| | | | | *fA*mG | | | |
| | hsMED13-15* | mGmUfCmUfAmAfA | 928 | fAfCmGfAmUfUmA | 952 | 77 | 1110 |
| | | mAfUmAfUmAfUmG | | fCmAfUmAfUmAfU | | | |
| | | fUmAfAmUfCmGfU | | UmUfmUfAmGfAmC | | | |
| | | | | *fC*mA | | | |

*Oligonucleotide designed to have cross-species activity;
# Inhibition did not reach 80% or greater at highest concentration tested (100 nM)
‘mN’ represents a 2′-O-methyl modified nucleoside (e.g., mU is 2′-O-methyl modified uridine),
‘fN’ represents a 2′-fluoro modified nucleoside (e.g., fU is 2′-fluoro modified uridine),
‘*’ represents a phosphorothioate internucleoside linkage, and lack of “*” between nucleosides indicate phosphodiester internucleoside linkage

### Example 31: Inhibiting PPP1R3A with Candidate Oligonucleotides

[0976] To evaluate candidate oligonucleotides for inhibiting human and murine PPP1R3A, siRNAs were screened in a dual luciferase reporter assay. A dose response analysis was conducted over 10 concentrations of each siRNA, from 100 nM to 10 fM, with a fold change of 6 between each dose. Gene inhibition results were used to calculate IC₅₀ and IC₈₀ values for each oligonucleotide. FIGS. 27A (human) and 27B (murine) show dose response curves for inhibition of PPP1R3A and Tables 57 (human) and 58 (murine) show the corresponding IC₅₀ and IC₈₀.

TABLE 57
Oligonucleotide inhibition of human PPP1R3A

| | | | SEQ | | SEQ | | |
|---|---|---|---|---|---|---|---|
| | | Sense | ID | Antisense | ID | IC₅₀ | IC₈₀ |
| Target | siRNA # | Sequence | NO: | Sequence | NO: | (pM) | (pM) |
| Human | hsPPP1R3A-8* | mAmCfAmCfAmUfU | 995 | fUfGmCfUmAfAmA | 1019 | 7 | 29 |
| PPP1R3A | | mAfUmGfAmCfAmU | | fAmUfGmUfCmAfU | | | |
| | | fUmUfUmAfGmCfA | | mAfAmUfGmUfGmU | | | |
| | | | | *fC*mU | | | |
| | hsPPP1R3A-15 | mAmUfCmAfAmGfG | 1002 | fAfAmCfUmCfGmA | 1026 | 4 | 14 |
| | | mGfUmAfUmUfAmU | | fAmUfAmAfUmAfC | | | |
| | | fUmCfGmAfGmUfU | | mCfCmUfUmGfAmU | | | |
| | | | | *fA*mC | | | |
| | hsPPP1R3A-16 | mUmGfCmUfGmAfU | 1003 | fUfUmGfAmAfUmC | 1027 | 34 | 170 |
| | | mUfCmCfUmUfUmG | | fCmAfAmAfGmGfA | | | |
| | | fGmAfUmUfCmAfA | | mAfUmCfAmGfCmA | | | |
| | | | | *fA*mA | | | |

*Oligonucleotide designed to have cross-species activity
‘mN’ represents a 2′-O-methyl modified nucleoside (e.g., mU is 2′-O-methyl modified uridine),
‘fN’ represents a 2′-fluoro modified nucleoside (e.g., fU is 2′-fluoro modified uridine),
‘*’ represents a phosphorothioate internucleoside linkage, and lack of “*” between nucleosides indicate phosphodiester internucleoside linkage

TABLE 58
Oligonucleotide inhibition of murine PPP1R3A

| | | | SEQ | | SEQ | | |
|---|---|---|---|---|---|---|---|
| | | Sense | ID | Antisense | ID | IC₅₀ | IC₈₀ |
| Target | siRNA # | Sequence | NO: | Sequence | NO: | (pM) | (pM) |
| Murine | mmPPP1R3A-3 | mGmAfCmCfAmUfU | 1007 | fAfAmUfGmAfUmCf | 1031 | 17 | 97 |
| PPP1R3A | | mAfUmGfCmUfUmG | | CmAfAmGfCmAfUmA | | | |
| | | fGmAfUmCfAmUfU | | fAmUfGmGfUmC*fC | | | |
| | | | | *mU | | | |
| | mmPPP1R3A-4 | mAmAfGmGfAmGfA | 1008 | fUfCmCfAmAfUmUf | 1032 | 8 | 36 |
| | | mAfAmCfAmUfGmG | | CmCfAmUfGmUfUmU | | | |
| | | fAmAfUmUfGmGfA | | fCmUfCmCfUmU*fG | | | |
| | | | | *mU | | | |

‘mN’ represents a 2′-O-methyl modified nucleoside (e.g., mU is 2′-O-methyl modified uridine),
‘fN’ represents a 2′-fluoro modified nucleoside (e.g., fU is 2′-fluoro modified uridine),
‘*’ represents a phosphorothioate internucleoside linkage, and lack of “*” between nucleosides indicate phosphodiester internucleoside linkage

### Example 32. In Vivo Activity of Conjugates Containing Anti-TfR1 Fab Conjugated to DMPK-Targeting Oligonucleotide in Mice Expressing the Human TfR1

[0977] Conjugates containing anti-TfR1 Fab 3M12-VH4/VK3 conjugated to a DMPK-targeting oligonucleotide (ASO300) were tested in a mouse model that expresses human TfR1. The anti-TfR1 Fab 3M12-VH4/VK3 was conjugated to a DMPK-targeting oligonucleotide via a cleavable linker having the structure of Formula (I). The conjugate was administered to the mice at a dose equivalent to 10 mg/kg oligonucleotide on day 0 and day 7. Mice were sacrificed on day 14 and different muscle tissues were collected and analyzed for dmpk mRNA level and oligonucleotide concentration in the tissue. The conjugate reduced mouse wild-type dmpk in Tibialis Anterior by 79% (FIG. 28A), in gastrocnemius by 76% (FIG. 28B), in the heart by 70% (FIG. 28C), and in diaphragm by 88% (FIG. 28D). Oligonucleotide distributions in Tibialis Anterior, gastrocnemius, heart, and diaphragm are shown in FIGS. 28E-28H.

[0978] These data indicate that anti-TfR1 Fab 3M12-VH4/VK3 enabled cellular internalization of the conjugate into muscle-specific tissues in an in vivo mouse model, thereby allowing the DMPK-targeting oligonucleotide to reduce expression of DMPK. Similarly, an anti-TfR1 antibody (e.g., anti-TfR1 Fab 3M12-VH4/VK3) can enable cellular internalization of a conjugate containing the anti-TfR1 antibody conjugated to an oligonucleotide targeting MSTN, ACVR1B, INHBA, MLCK1, ACVR1, FBXO32, TRIM63, MEF2D, KLF15, MED1, MED13, or PPP1R3A for reducing expression of MSTN, ACVR1B, INHBA, MLCK1, ACVR1, FBXO32, TRIM63, MEF2D, KLF15, MED1, MED13, or PPP1R3A respectively.

### Additional Embodiments

[0979] A1. A complex comprising an anti-transferrin receptor 1 antibody covalently linked to a molecular payload that modulates the expression or activity of myostatin (MSTN), inhibin beta A (INHBA) and/or activin receptor type-1B (ACVR1B), wherein the antibody comprises:

[0980] (i) a heavy chain variable region (VH) comprising an amino acid sequence at least 85% identical to SEQ ID NO: 76; and/or a light chain variable region (VL) comprising an amino acid sequence at least 85% identical to SEQ ID NO: 75;

[0981] (ii) a heavy chain variable region (VH) comprising an amino acid sequence at least 85% identical to SEQ ID NO: 71; and/or a light chain variable region (VL) comprising an amino acid sequence at least 85% identical to SEQ ID NO: 70;

[0982] (iii) a heavy chain variable region (VH) comprising an amino acid sequence at least 85% identical to SEQ ID NO: 72; and/or a light chain variable region (VL) comprising an amino acid sequence at least 85% identical to SEQ ID NO: 70;

[0983] (iv) a heavy chain variable region (VH) comprising an amino acid sequence at least 85% identical to SEQ ID NO: 73; and/or a light chain variable region (VL) comprising an amino acid sequence at least 85% identical to SEQ ID NO: 74;

[0984] (v) a heavy chain variable region (VH) comprising an amino acid sequence at least 85% identical to SEQ ID NO: 73; and/or a light chain variable region (VL) comprising an amino acid sequence at least 85% identical to SEQ ID NO: 75;

[0985] (vi) a heavy chain variable region (VH) comprising an amino acid sequence at least 85% identical to SEQ ID NO: 76; and/or a light chain variable region (VL) comprising an amino acid sequence at least 85% identical to SEQ ID NO: 74;

[0986] (vii) a heavy chain variable region (VH) comprising an amino acid sequence at least 85% identical to SEQ ID NO: 69; and/or a light chain variable region (VL) comprising an amino acid sequence at least 85% identical to SEQ ID NO: 70;

[0987] (viii) a heavy chain variable region (VH) comprising an amino acid sequence at least 85% identical to SEQ ID NO: 77; and/or a light chain variable region (VL) comprising an amino acid sequence at least 85% identical to SEQ ID NO: 78;

[0988] (ix) a heavy chain variable region (VH) comprising an amino acid sequence at least 85% identical to SEQ ID NO: 79; and/or a light chain variable region (VL) comprising an amino acid sequence at least 85% identical to SEQ ID NO: 80; or

[0989] (x) a heavy chain variable region (VH) comprising an amino acid sequence at least 85% identical to SEQ ID NO: 77; and/or a light chain variable region (VL) comprising an amino acid sequence at least 85% identical to SEQ ID NO: 80.

[0990] A2. The complex of embodiment A1, wherein the antibody comprises:

[0991] (i) a VH comprising the amino acid sequence of SEQ ID NO: 76 and a VL comprising the amino acid sequence of SEQ ID NO: 75;

[0992] (ii) a VH comprising the amino acid sequence of SEQ ID NO: 71 and a VL comprising the amino acid sequence of SEQ ID NO: 70;

[0993] (iii) a VH comprising the amino acid sequence of SEQ ID NO: 72 and a VL comprising the amino acid sequence of SEQ ID NO: 70;

[0994] (iv) a VH comprising the amino acid sequence of SEQ ID NO: 73 and a VL comprising the amino acid sequence of SEQ ID NO: 74;

[0995] (v) a VH comprising the amino acid sequence of SEQ ID NO: 73 and a VL comprising the amino acid sequence of SEQ ID NO: 75;

[0996] (vi) a VH comprising the amino acid sequence of SEQ ID NO: 76 and a VL comprising the amino acid sequence of SEQ ID NO: 74;

[0997] (vii) a VH comprising the amino acid sequence of SEQ ID NO: 69 and a VL comprising the amino acid sequence of SEQ ID NO: 70;

[0998] (viii) a VH comprising the amino acid sequence of SEQ ID NO: 77 and a VL comprising the amino acid sequence of SEQ ID NO: 78;

[0999] (ix) a VH comprising the amino acid sequence of SEQ ID NO: 79 and a VL comprising the amino acid sequence of SEQ ID NO: 80; or

[1000] (x) a VH comprising the amino acid sequence of SEQ ID NO: 77 and a VL comprising the amino acid sequence of SEQ ID NO: 80.

[1001] A3. The complex of embodiment A1 or embodiment A2, wherein the antibody is selected from the group consisting of a full-length IgG, a Fab fragment, a Fab′ fragment, a F(ab′)2 fragment, a scFv, and a Fv.

[1002] A4. The complex of embodiment A3, wherein the antibody is a full-length IgG, optionally wherein the full-length IgG comprises a heavy chain constant region of the isotype IgG1, IgG2, IgG3, or IgG4.

[1003] A5. The complex of embodiment A4, wherein the antibody comprises:

[1004] (i) a heavy chain comprising an amino acid sequence at least 85% identical to SEQ ID NO: 91; and/or a light chain comprising an amino acid sequence at least 85% identical to SEQ ID NO: 90;

[1005] (ii) a heavy chain comprising an amino acid sequence at least 85% identical to SEQ ID NO: 86; and/or a light chain comprising an amino acid sequence at least 85% identical to SEQ ID NO: 85;

[1006] (iii) a heavy chain comprising an amino acid sequence at least 85% identical to SEQ ID NO: 87; and/or a light chain comprising an amino acid sequence at least 85% identical to SEQ ID NO: 85;

[1007] (iv) a heavy chain comprising an amino acid sequence at least 85% identical to SEQ ID NO: 88; and/or a light chain comprising an amino acid sequence at least 85% identical to SEQ ID NO: 89;

[1008] (v) a heavy chain comprising an amino acid sequence at least 85% identical to SEQ ID NO: 88; and/or a light chain comprising an amino acid sequence at least 85% identical to SEQ ID NO: 90;

[1009] (vi) a heavy chain comprising an amino acid sequence at least 85% identical to SEQ ID NO: 91; and/or a light chain comprising an amino acid sequence at least 85% identical to SEQ ID NO: 89;

[1010] (vii) a heavy chain comprising an amino acid sequence at least 85% identical to SEQ ID NO: 84; and/or a light chain comprising an amino acid sequence at least 85% identical to SEQ ID NO: 85;

[1011] (viii) a heavy chain comprising an amino acid sequence at least 85% identical to SEQ ID NO: 92; and/or a light chain comprising an amino acid sequence at least 85% identical to SEQ ID NO: 93;

[1012] (ix) a heavy chain comprising an amino acid sequence at least 85% identical to SEQ ID NO: 94; and/or a light chain comprising an amino acid sequence at least 85% identical to SEQ ID NO: 95; or

[1013] (x) a heavy chain comprising an amino acid sequence at least 85% identical to SEQ ID NO: 92; and/or a light chain comprising an amino acid sequence at least 85% identical to SEQ ID NO: 95.

[1014] A6. The complex of embodiment A3, wherein the antibody is a Fab fragment.

[1015] A7. The complex of embodiment A6, wherein the antibody comprises:

[1016] (i) a heavy chain comprising an amino acid sequence at least 85% identical to SEQ ID NO: 101; and/or a light chain comprising an amino acid sequence at least 85% identical to SEQ ID NO: 90;

[1017] (ii) a heavy chain comprising an amino acid sequence at least 85% identical to SEQ ID NO: 98; and/or a light chain comprising an amino acid sequence at least 85% identical to SEQ ID NO: 85;

[1018] (iii) a heavy chain comprising an amino acid sequence at least 85% identical to SEQ ID NO: 99; and/or a light chain comprising an amino acid sequence at least 85% identical to SEQ ID NO: 85;

[1019] (iv) a heavy chain comprising an amino acid sequence at least 85% identical to SEQ ID NO: 100; and/or a light chain comprising an amino acid sequence at least 85% identical to SEQ ID NO: 89;

[1020] (v) a heavy chain comprising an amino acid sequence at least 85% identical to SEQ ID NO: 100; and/or a light chain comprising an amino acid sequence at least 85% identical to SEQ ID NO: 90;

[1021] (vi) a heavy chain comprising an amino acid sequence at least 85% identical to SEQ ID NO: 101; and/or a light chain comprising an amino acid sequence at least 85% identical to SEQ ID NO: 89;

[1022] (vii) a heavy chain comprising an amino acid sequence at least 85% identical to SEQ ID NO: 97; and/or a light chain comprising an amino acid sequence at least 85% identical to SEQ ID NO: 85;

[1023] (viii) a heavy chain comprising an amino acid sequence at least 85% identical to SEQ ID NO: 102; and/or a light chain comprising an amino acid sequence at least 85% identical to SEQ ID NO: 93;

[1024] (ix) a heavy chain comprising an amino acid sequence at least 85% identical to SEQ ID NO: 103; and/or a light chain comprising an amino acid sequence at least 85% identical to SEQ ID NO: 95; or

[1025] (x) a heavy chain comprising an amino acid sequence at least 85% identical to SEQ ID NO: 102; and/or a light chain comprising an amino acid sequence at least 85% identical to SEQ ID NO: 95.

[1026] A8. The complex of embodiment A6 or embodiment A7, wherein the antibody comprises:

[1027] (i) a heavy chain comprising the amino acid sequence of SEQ ID NO: 101; and a light chain comprising the amino acid sequence of SEQ ID NO: 90;

[1028] (ii) a heavy chain comprising the amino acid sequence of SEQ ID NO: 98; and a light chain comprising the amino acid sequence of SEQ ID NO: 85;

[1029] (iii) a heavy chain comprising the amino acid sequence of SEQ ID NO: 99; and a light chain comprising the amino acid sequence of SEQ ID NO: 85;

[1030] (iv) a heavy chain comprising the amino acid sequence of SEQ ID NO: 100; and a light chain comprising the amino acid sequence of SEQ ID NO: 89;

[1031] (v) a heavy chain comprising the amino acid sequence of SEQ ID NO: 100; and a light chain comprising the amino acid sequence of SEQ ID NO: 90;

[1032] (vi) a heavy chain comprising the amino acid sequence of SEQ ID NO: 101; and a light chain comprising the amino acid sequence of SEQ ID NO: 89;

[1033] (vii) a heavy chain comprising the amino acid sequence of SEQ ID NO: 97; and a light chain comprising the amino acid sequence of SEQ ID NO: 85;

[1034] (viii) a heavy chain comprising the amino acid sequence of SEQ ID NO: 102; and a light chain comprising the amino acid sequence of SEQ ID NO: 93;

[1035] (ix) a heavy chain comprising the amino acid sequence of SEQ ID NO: 103; and a light chain comprising the amino acid sequence of SEQ ID NO: 95; or

[1036] (x) a heavy chain comprising the amino acid sequence of SEQ ID NO: 102; and a light chain comprising the amino acid sequence of SEQ ID NO: 95.

[1037] A9. The complex of any one of embodiments A1 to A8, wherein the equilibrium dissociation constant (K_{D}) of binding of the antibody to the transferrin receptor is in a range from 10⁻¹¹ M to 10⁻⁶ M.

[1038] A10. The complex of any one of embodiments A1 to A9, wherein the antibody does not specifically bind to the transferrin binding site of the transferrin receptor and/or wherein the antibody does not inhibit binding of transferrin to the transferrin receptor.

[1039] A11. The complex of any one of embodiments A1 to A10, wherein the antibody is cross-reactive with extracellular epitopes of two or more of a human, non-human primate and rodent transferrin receptor.

[1040] A12. The complex of any one of embodiments A1 to A11, wherein the complex is configured to promote transferrin receptor mediated internalization of the molecular payload into a muscle cell.

[1041] A13. The complex of any one of embodiments A1 to A12, wherein the molecular payload is an oligonucleotide comprising an antisense strand comprising a region of complementarity to an MSTN target sequence, optionally wherein the MSTN target sequence is an MSTN mRNA sequence as set forth in SEQ ID NOs: 146-148, or an MSTN target sequence as set forth in any one of SEQ ID NOs: 149-196, further optionally wherein the antisense strand is 18-25 nucleotides in length and/or the region of complementarity is at least 16 nucleosides in length.

[1042] A14. The complex of embodiments A13, wherein the antisense strand comprises at least 16 consecutive nucleotides of a nucleotide sequence set forth in any one of SEQ ID NOs: 197-220, wherein each of the Us are optionally and independently Ts, optionally wherein the antisense strand comprises the nucleotide sequence of any one of SEQ ID NOs: 197-220, wherein each of the Us are optionally and independently Ts.

[1043] A15. The complex of any one of embodiments A1 to A12, wherein the molecular payload is an oligonucleotide comprising an antisense strand comprising a region of complementarity to an INHBA target sequence, optionally wherein the INHBA target sequence is an INHBA mRNA sequence as set forth in SEQ ID NO: 269 or SEQ ID NO: 270, or an INHBA target sequence as set forth in any one of SEQ ID NOs: 271-318, further optionally wherein the antisense strand is 18-25 nucleotides in length and/or the region of complementarity is at least 16 nucleosides in length.

[1044] A16. The complex of embodiment A15, wherein the antisense strand comprises at least 16 consecutive nucleotides of a nucleotide sequence set forth in any one of SEQ ID NOs: 319-342, wherein each of the Us are optionally and independently Ts, optionally wherein the antisense strand comprises the nucleotide sequence of any one of SEQ ID NOs: 319-342, wherein each of the Us are optionally and independently Ts.

[1045] A17. The complex of any one of embodiments A1 to A12, wherein the molecular payload is an oligonucleotide comprising an antisense strand comprising a region of complementarity to an ACVR1B target sequence, optionally wherein the ACVR1B target sequence is an ACVR1B mRNA sequence as set forth in any one of SEQ ID NOs: 367-370, or an ACVR1B target sequence as set forth in any one of SEQ ID NOs: 221-268, further optionally wherein the antisense strand is 18-25 nucleotides in length and/or the region of complementarity is at least 16 nucleosides in length.

[1046] A18. The complex of embodiment A17, wherein the antisense strand comprises at least 16 consecutive nucleotides of a nucleotide sequence set forth in any one of SEQ ID NOs: 343-366, wherein each of the Us are optionally and independently Ts, optionally wherein the antisense strand comprises the nucleotide sequence of any one of SEQ ID NOs: 343-366, wherein each of the Us are optionally and independently Ts.

[1047] A19. The complex of any one of embodiments A13 to A18, wherein the oligonucleotide further comprises a sense strand that hybridizes to the antisense strand to form a double stranded siRNA.

[1048] A20. The complex of any one of embodiments A13 to A19, wherein the oligonucleotide comprises one or more modified nucleosides, optionally wherein each nucleoside in the oligonucleotide is a modified nucleoside.

[1049] A21. The complex of embodiment A20, wherein the one or more modified nucleosides are 2′ modified nucleotides, optionally wherein the one or more 2′ modified nucleosides are selected from: 2′-fluoro (2′-F), 2′-O-methyl (2′-O-Me), 2′-O-methoxyethyl (2′-MOE), 2′-O-aminopropyl (2′-O-AP), 2′-O-dimethylaminoethyl (2′-O-DMAOE), 2′-O-dimethylaminopropyl (2′-O-DMAP), 2′-O-dimethylaminoethyloxyethyl (2′-O-DMAEOE), 2′-O—N-methylacetamido (2′-O-NMA), locked nucleic acid (LNA), ethylene-bridged nucleic acid (ENA), and (S)-constrained ethyl-bridged nucleic acid (cEt), optionally wherein the 2′ modified nucleotide is 2′-O-methyl or 2′-fluoro (2′-F).

[1050] A22. The complex of any one of embodiments A13 to A21, wherein the oligonucleotide comprises one or more phosphorothioate internucleoside linkages, optionally wherein the one or more phosphorothioate internucleoside linkage are present on the antisense strand of the RNAi oligonucleotide, further optionally wherein the two internucleoside linkages at the 3′ end of the sense strands are phosphorothioate internucleoside linkages.

[1051] A23. The complex of any one of embodiments A13, A14, and A19 to A22, wherein the oligonucleotide is an siRNA listed in Table 10.

[1052] A24. The complex of any one of embodiments A15, A16, and A19 to A22, wherein the oligonucleotide is an siRNA listed in Table 13.

[1053] A25. The complex of any one of embodiments A17 to A22, wherein the oligonucleotide is an siRNA listed in Table 16.

[1054] A26. The complex of any one of embodiments A1 to A25, wherein the antibody is covalently linked to the molecular payload via

[1055] (i) a cleavable linker, optionally wherein the cleavable linker comprises a valine-citrulline sequence; or

[1056] (ii) a non-cleavable linker, optionally wherein the non-cleavable linker is an alkane linker.

[1057] A27. A method of reducing MSTN, INHBA, and/or ACVR1B expression in a muscle cell, the method comprising contacting the muscle cell with an effective amount of the complex of any one of embodiments A1 to A26 for promoting internalization of the molecular payload to the muscle cell.

[1058] A28. A method of treating muscle atrophy the method comprising administering to a subject in need thereof an effective amount of the complex of any one of embodiments A1 to A26, wherein the subject has elevated expression or activity of MSTN, INHBA, and/or ACVR1B.

[1059] A29. The method of embodiment A27 or embodiment A28, wherein the complex reduces RNA level of MSTN, INHBA, and/or ACVR1B.

[1060] A30. The method of any one of embodiments A27 to A29, wherein the complex reduces protein level of MSTN, INHBA, and/or ACVR1B.

[1061] B1. A complex comprising an anti-transferrin receptor 1 antibody covalently linked to a molecular payload that modulates the expression or activity of myosin light chain kinase 1 (MLCK1), wherein the antibody comprises:

[1062] (i) a heavy chain variable region (VH) comprising an amino acid sequence at least 85% identical to SEQ ID NO: 76; and/or a light chain variable region (VL) comprising an amino acid sequence at least 85% identical to SEQ ID NO: 75;

[1063] (ii) a heavy chain variable region (VH) comprising an amino acid sequence at least 85% identical to SEQ ID NO: 71; and/or a light chain variable region (VL) comprising an amino acid sequence at least 85% identical to SEQ ID NO: 70;

[1064] (iii) a heavy chain variable region (VH) comprising an amino acid sequence at least 85% identical to SEQ ID NO: 72; and/or a light chain variable region (VL) comprising an amino acid sequence at least 85% identical to SEQ ID NO: 70;

[1065] (iv) a heavy chain variable region (VH) comprising an amino acid sequence at least 85% identical to SEQ ID NO: 73; and/or a light chain variable region (VL) comprising an amino acid sequence at least 85% identical to SEQ ID NO: 74;

[1066] (v) a heavy chain variable region (VH) comprising an amino acid sequence at least 85% identical to SEQ ID NO: 73; and/or a light chain variable region (VL) comprising an amino acid sequence at least 85% identical to SEQ ID NO: 75;

[1067] (vi) a heavy chain variable region (VH) comprising an amino acid sequence at least 85% identical to SEQ ID NO: 76; and/or a light chain variable region (VL) comprising an amino acid sequence at least 85% identical to SEQ ID NO: 74;

[1068] (vii) a heavy chain variable region (VH) comprising an amino acid sequence at least 85% identical to SEQ ID NO: 69; and/or a light chain variable region (VL) comprising an amino acid sequence at least 85% identical to SEQ ID NO: 70;

[1069] (viii) a heavy chain variable region (VH) comprising an amino acid sequence at least 85% identical to SEQ ID NO: 77; and/or a light chain variable region (VL) comprising an amino acid sequence at least 85% identical to SEQ ID NO: 78;

[1070] (ix) a heavy chain variable region (VH) comprising an amino acid sequence at least 85% identical to SEQ ID NO: 79; and/or a light chain variable region (VL) comprising an amino acid sequence at least 85% identical to SEQ ID NO: 80; or

[1071] (x) a heavy chain variable region (VH) comprising an amino acid sequence at least 85% identical to SEQ ID NO: 77; and/or a light chain variable region (VL) comprising an amino acid sequence at least 85% identical to SEQ ID NO: 80.

[1072] B2. The complex of embodiment B1, wherein the antibody comprises:

[1073] (i) a VH comprising the amino acid sequence of SEQ ID NO: 76 and a VL comprising the amino acid sequence of SEQ ID NO: 75;

[1074] (ii) a VH comprising the amino acid sequence of SEQ ID NO: 71 and a VL comprising the amino acid sequence of SEQ ID NO: 70;

[1075] (iii) a VH comprising the amino acid sequence of SEQ ID NO: 72 and a VL comprising the amino acid sequence of SEQ ID NO: 70;

[1076] (iv) a VH comprising the amino acid sequence of SEQ ID NO: 73 and a VL comprising the amino acid sequence of SEQ ID NO: 74;

[1077] (v) a VH comprising the amino acid sequence of SEQ ID NO: 73 and a VL comprising the amino acid sequence of SEQ ID NO: 75;

[1078] (vi) a VH comprising the amino acid sequence of SEQ ID NO: 76 and a VL comprising the amino acid sequence of SEQ ID NO: 74;

[1079] (vii) a VH comprising the amino acid sequence of SEQ ID NO: 69 and a VL comprising the amino acid sequence of SEQ ID NO: 70;

[1080] (viii) a VH comprising the amino acid sequence of SEQ ID NO: 77 and a VL comprising the amino acid sequence of SEQ ID NO: 78;

[1081] (ix) a VH comprising the amino acid sequence of SEQ ID NO: 79 and a VL comprising the amino acid sequence of SEQ ID NO: 80; or

[1082] (x) a VH comprising the amino acid sequence of SEQ ID NO: 77 and a VL comprising the amino acid sequence of SEQ ID NO: 80.

[1083] B3. The complex of embodiment B1 or embodiment B2, wherein the antibody is selected from the group consisting of a full-length IgG, a Fab fragment, a Fab′ fragment, a F(ab′)2 fragment, a scFv, and a Fv.

[1084] B4. The complex of embodiment B3, wherein the antibody is a full-length IgG, optionally wherein the full-length IgG comprises a heavy chain constant region of the isotype IgG1, IgG2, IgG3, or IgG4.

[1085] B5. The complex of embodiment B4, wherein the antibody comprises:

[1086] (i) a heavy chain comprising an amino acid sequence at least 85% identical to SEQ ID NO: 91; and/or a light chain comprising an amino acid sequence at least 85% identical to SEQ ID NO: 90;

[1087] (ii) a heavy chain comprising an amino acid sequence at least 85% identical to SEQ ID NO: 86; and/or a light chain comprising an amino acid sequence at least 85% identical to SEQ ID NO: 85;

[1088] (iii) a heavy chain comprising an amino acid sequence at least 85% identical to SEQ ID NO: 87; and/or a light chain comprising an amino acid sequence at least 85% identical to SEQ ID NO: 85;

[1089] (iv) a heavy chain comprising an amino acid sequence at least 85% identical to SEQ ID NO: 88; and/or a light chain comprising an amino acid sequence at least 85% identical to SEQ ID NO: 89;

[1090] (v) a heavy chain comprising an amino acid sequence at least 85% identical to SEQ ID NO: 88; and/or a light chain comprising an amino acid sequence at least 85% identical to SEQ ID NO: 90;

[1091] (vi) a heavy chain comprising an amino acid sequence at least 85% identical to SEQ ID NO: 91; and/or a light chain comprising an amino acid sequence at least 85% identical to SEQ ID NO: 89;

[1092] (vii) a heavy chain comprising an amino acid sequence at least 85% identical to SEQ ID NO: 84; and/or a light chain comprising an amino acid sequence at least 85% identical to SEQ ID NO: 85;

[1093] (viii) a heavy chain comprising an amino acid sequence at least 85% identical to SEQ ID NO: 92; and/or a light chain comprising an amino acid sequence at least 85% identical to SEQ ID NO: 93;

[1094] (ix) a heavy chain comprising an amino acid sequence at least 85% identical to SEQ ID NO: 94; and/or a light chain comprising an amino acid sequence at least 85% identical to SEQ ID NO: 95; or

[1095] (x) a heavy chain comprising an amino acid sequence at least 85% identical to SEQ ID NO: 92; and/or a light chain comprising an amino acid sequence at least 85% identical to SEQ ID NO: 95.

[1096] B6. The complex of embodiment B3, wherein the antibody is a Fab fragment.

[1097] B7. The complex of embodiment B6, wherein the antibody comprises:

[1098] (i) a heavy chain comprising an amino acid sequence at least 85% identical to SEQ ID NO: 101; and/or a light chain comprising an amino acid sequence at least 85% identical to SEQ ID NO: 90;

[1099] (ii) a heavy chain comprising an amino acid sequence at least 85% identical to SEQ ID NO: 98; and/or a light chain comprising an amino acid sequence at least 85% identical to SEQ ID NO: 85;

[1100] (iii) a heavy chain comprising an amino acid sequence at least 85% identical to SEQ ID NO: 99; and/or a light chain comprising an amino acid sequence at least 85% identical to SEQ ID NO: 85;

[1101] (iv) a heavy chain comprising an amino acid sequence at least 85% identical to SEQ ID NO: 100; and/or a light chain comprising an amino acid sequence at least 85% identical to SEQ ID NO: 89;

[1102] (v) a heavy chain comprising an amino acid sequence at least 85% identical to SEQ ID NO: 100; and/or a light chain comprising an amino acid sequence at least 85% identical to SEQ ID NO: 90;

[1103] (vi) a heavy chain comprising an amino acid sequence at least 85% identical to SEQ ID NO: 101; and/or a light chain comprising an amino acid sequence at least 85% identical to SEQ ID NO: 89;

[1104] (vii) a heavy chain comprising an amino acid sequence at least 85% identical to SEQ ID NO: 97; and/or a light chain comprising an amino acid sequence at least 85% identical to SEQ ID NO: 85;

[1105] (viii) a heavy chain comprising an amino acid sequence at least 85% identical to SEQ ID NO: 102; and/or a light chain comprising an amino acid sequence at least 85% identical to SEQ ID NO: 93;

[1106] (ix) a heavy chain comprising an amino acid sequence at least 85% identical to SEQ ID NO: 103; and/or a light chain comprising an amino acid sequence at least 85% identical to SEQ ID NO: 95; or

[1107] (x) a heavy chain comprising an amino acid sequence at least 85% identical to SEQ ID NO: 102; and/or a light chain comprising an amino acid sequence at least 85% identical to SEQ ID NO: 95.

[1108] B8. The complex of embodiment B6 or embodiment B7, wherein the antibody comprises:

[1109] (i) a heavy chain comprising the amino acid sequence of SEQ ID NO: 101; and a light chain comprising the amino acid sequence of SEQ ID NO: 90;

[1110] (ii) a heavy chain comprising the amino acid sequence of SEQ ID NO: 98; and a light chain comprising the amino acid sequence of SEQ ID NO: 85;

[1111] (iii) a heavy chain comprising the amino acid sequence of SEQ ID NO: 99; and a light chain comprising the amino acid sequence of SEQ ID NO: 85;

[1112] (iv) a heavy chain comprising the amino acid sequence of SEQ ID NO: 100; and a light chain comprising the amino acid sequence of SEQ ID NO: 89;

[1113] (v) a heavy chain comprising the amino acid sequence of SEQ ID NO: 100; and a light chain comprising the amino acid sequence of SEQ ID NO: 90;

[1114] (vi) a heavy chain comprising the amino acid sequence of SEQ ID NO: 101; and a light chain comprising the amino acid sequence of SEQ ID NO: 89;

[1115] (vii) a heavy chain comprising the amino acid sequence of SEQ ID NO: 97; and a light chain comprising the amino acid sequence of SEQ ID NO: 85;

[1116] (viii) a heavy chain comprising the amino acid sequence of SEQ ID NO: 102; and a light chain comprising the amino acid sequence of SEQ ID NO: 93;

[1117] (ix) a heavy chain comprising the amino acid sequence of SEQ ID NO: 103; and a light chain comprising the amino acid sequence of SEQ ID NO: 95; or

[1118] (x) a heavy chain comprising the amino acid sequence of SEQ ID NO: 102; and a light chain comprising the amino acid sequence of SEQ ID NO: 95.

[1119] B9. The complex of any one of embodiments B1 to B8, wherein the equilibrium dissociation constant (K_{D}) of binding of the antibody to the transferrin receptor is in a range from 10⁻¹¹ M to 10⁻⁶ M.

[1120] B10. The complex of any one of embodiments B1 to B9, wherein the antibody does not specifically bind to the transferrin binding site of the transferrin receptor and/or wherein the antibody does not inhibit binding of transferrin to the transferrin receptor.

[1121] B11. The complex of any one of embodiments B1 to B10, wherein the antibody is cross-reactive with extracellular epitopes of two or more of a human, non-human primate and rodent transferrin receptor.

[1122] B12. The complex of any one of embodiments B1 to B11, wherein the complex is configured to promote transferrin receptor mediated internalization of the molecular payload into a muscle cell.

[1123] B13. The complex of any one of embodiments B1 to B12, wherein the molecular payload is an oligonucleotide.

[1124] B14. The complex of any one of embodiments B1 to B13, wherein the molecular payload is an oligonucleotide comprising an antisense strand comprising a region of complementarity to MLCK1 mRNA, optionally wherein the MLCK1 mRNA is set forth in SEQ ID NO: 152.

[1125] B15. The complex of embodiment B14, wherein the antisense strand is 18-25 nucleotides in length and/or the region of complementarity is at least 16 nucleosides in length.

[1126] B16. The complex of embodiment B14 or embodiment B15, wherein the oligonucleotide further comprises a sense strand that hybridizes to the antisense strand to form a double stranded siRNA.

[1127] B17. The complex of any one of embodiments B14 to B16, wherein the oligonucleotide comprises one or more modified nucleosides, optionally wherein each nucleoside in the oligonucleotide is a modified nucleoside.

[1128] B18. The complex of embodiment B17, wherein the one or more modified nucleosides are 2′ modified nucleotides, optionally wherein the one or more 2′ modified nucleosides are selected from: 2′-fluoro (2′-F), 2′-O-methyl (2′-O-Me), 2′-O-methoxyethyl (2′-MOE), 2′-O-aminopropyl (2′-O-AP), 2′-O-dimethylaminoethyl (2′-O-DMAOE), 2′-O-dimethylaminopropyl (2′-O-DMAP), 2′-O-dimethylaminoethyloxyethyl (2′-O-DMAEOE), 2′-O—N-methylacetamido (2′-O-NMA), locked nucleic acid (LNA), ethylene-bridged nucleic acid (ENA), and (S)-constrained ethyl-bridged nucleic acid (cEt).

[1129] B19. The complex of embodiment B18, wherein the 2′ modified nucleotide is 2′-O-methyl or 2′-fluoro (2′-F).

[1130] B20. The complex of any one of embodiments B14 to B19, wherein the oligonucleotide comprises one or more phosphorothioate internucleoside linkages.

[1131] B21. The complex of any one of embodiments B1 to B20, wherein the antibody is covalently linked to the molecular payload via

[1132] (i) a cleavable linker, optionally wherein the cleavable linker comprises a valine-citrulline sequence; or

[1133] (ii) a non-cleavable linker, optionally wherein the non-cleavable linker is an alkane linker.

[1134] B22. A method of reducing MLCK1 expression in a muscle cell, the method comprising contacting the muscle cell with an effective amount of the complex of any one of embodiments B1 to B21 for promoting internalization of the oligonucleotide to the muscle cell.

[1135] B23. A method of treating irritable bowel syndrome (IBS) or irritable bowel disease (IBD) the method comprising administering to a subject in need thereof an effective amount of the complex of any one of embodiment B1 to B21, wherein the subject has elevated levels of MLCK1 protein, optionally wherein the subject is human, and optionally wherein the administration is intravenous.

[1136] B24. The method of embodiment B22 or embodiment B23, wherein the complex reduces MLCK1 RNA level.

[1137] B25. The method of any one of embodiments B22 to B24, wherein the complex reduces MLCK1 protein level.

[1138] C1. A complex comprising an anti-transferrin receptor 1 antibody covalently linked to a molecular payload that modulates the expression or activity of Activin A receptor, type 1 (ACVR1), wherein the antibody comprises:

[1139] (i) a heavy chain variable region (VH) comprising an amino acid sequence at least 85% identical to SEQ ID NO: 76; and/or a light chain variable region (VL) comprising an amino acid sequence at least 85% identical to SEQ ID NO: 75;

[1140] (ii) a heavy chain variable region (VH) comprising an amino acid sequence at least 85% identical to SEQ ID NO: 71; and/or a light chain variable region (VL) comprising an amino acid sequence at least 85% identical to SEQ ID NO: 70;

[1141] (iii) a heavy chain variable region (VH) comprising an amino acid sequence at least 85% identical to SEQ ID NO: 72; and/or a light chain variable region (VL) comprising an amino acid sequence at least 85% identical to SEQ ID NO: 70;

[1142] (iv) a heavy chain variable region (VH) comprising an amino acid sequence at least 85% identical to SEQ ID NO: 73; and/or a light chain variable region (VL) comprising an amino acid sequence at least 85% identical to SEQ ID NO: 74;

[1143] (v) a heavy chain variable region (VH) comprising an amino acid sequence at least 85% identical to SEQ ID NO: 73; and/or a light chain variable region (VL) comprising an amino acid sequence at least 85% identical to SEQ ID NO: 75;

[1144] (vi) a heavy chain variable region (VH) comprising an amino acid sequence at least 85% identical to SEQ ID NO: 76; and/or a light chain variable region (VL) comprising an amino acid sequence at least 85% identical to SEQ ID NO: 74;

[1145] (vii) a heavy chain variable region (VH) comprising an amino acid sequence at least 85% identical to SEQ ID NO: 69; and/or a light chain variable region (VL) comprising an amino acid sequence at least 85% identical to SEQ ID NO: 70;

[1146] (viii) a heavy chain variable region (VH) comprising an amino acid sequence at least 85% identical to SEQ ID NO: 77; and/or a light chain variable region (VL) comprising an amino acid sequence at least 85% identical to SEQ ID NO: 78;

[1147] (ix) a heavy chain variable region (VH) comprising an amino acid sequence at least 85% identical to SEQ ID NO: 79; and/or a light chain variable region (VL) comprising an amino acid sequence at least 85% identical to SEQ ID NO: 80; or

[1148] (x) a heavy chain variable region (VH) comprising an amino acid sequence at least 85% identical to SEQ ID NO: 77; and/or a light chain variable region (VL) comprising an amino acid sequence at least 85% identical to SEQ ID NO: 80.

[1149] C2. The complex of embodiment C1, wherein the antibody comprises:

[1150] (i) a VH comprising the amino acid sequence of SEQ ID NO: 76 and a VL comprising the amino acid sequence of SEQ ID NO: 75;

[1151] (ii) a VH comprising the amino acid sequence of SEQ ID NO: 71 and a VL comprising the amino acid sequence of SEQ ID NO: 70;

[1152] (iii) a VH comprising the amino acid sequence of SEQ ID NO: 72 and a VL comprising the amino acid sequence of SEQ ID NO: 70;

[1153] (iv) a VH comprising the amino acid sequence of SEQ ID NO: 73 and a VL comprising the amino acid sequence of SEQ ID NO: 74;

[1154] (v) a VH comprising the amino acid sequence of SEQ ID NO: 73 and a VL comprising the amino acid sequence of SEQ ID NO: 75;

[1155] (vi) a VH comprising the amino acid sequence of SEQ ID NO: 76 and a VL comprising the amino acid sequence of SEQ ID NO: 74;

[1156] (vii) a VH comprising the amino acid sequence of SEQ ID NO: 69 and a VL comprising the amino acid sequence of SEQ ID NO: 70;

[1157] (viii) a VH comprising the amino acid sequence of SEQ ID NO: 77 and a VL comprising the amino acid sequence of SEQ ID NO: 78;

[1158] (ix) a VH comprising the amino acid sequence of SEQ ID NO: 79 and a VL comprising the amino acid sequence of SEQ ID NO: 80; or

[1159] (x) a VH comprising the amino acid sequence of SEQ ID NO: 77 and a VL comprising the amino acid sequence of SEQ ID NO: 80.

[1160] C3. The complex of embodiment C1 or embodiment C2, wherein the antibody is selected from the group consisting of a full-length IgG, a Fab fragment, a Fab′ fragment, a F(ab′)2 fragment, a scFv, and a Fv.

[1161] C4. The complex of embodiment C3, wherein the antibody is a full-length IgG, optionally wherein the full-length IgG comprises a heavy chain constant region of the isotype IgG1, IgG2, IgG3, or IgG4.

[1162] C5. The complex of embodiment C4, wherein the antibody comprises:

[1163] (i) a heavy chain comprising an amino acid sequence at least 85% identical to SEQ ID NO: 91; and/or a light chain comprising an amino acid sequence at least 85% identical to SEQ ID NO: 90;

[1164] (ii) a heavy chain comprising an amino acid sequence at least 85% identical to SEQ ID NO: 86; and/or a light chain comprising an amino acid sequence at least 85% identical to SEQ ID NO: 85;

[1165] (iii) a heavy chain comprising an amino acid sequence at least 85% identical to SEQ ID NO: 87; and/or a light chain comprising an amino acid sequence at least 85% identical to SEQ ID NO: 85;

[1166] (iv) a heavy chain comprising an amino acid sequence at least 85% identical to SEQ ID NO: 88; and/or a light chain comprising an amino acid sequence at least 85% identical to SEQ ID NO: 89;

[1167] (v) a heavy chain comprising an amino acid sequence at least 85% identical to SEQ ID NO: 88; and/or a light chain comprising an amino acid sequence at least 85% identical to SEQ ID NO: 90;

[1168] (vi) a heavy chain comprising an amino acid sequence at least 85% identical to SEQ ID NO: 91; and/or a light chain comprising an amino acid sequence at least 85% identical to SEQ ID NO: 89;

[1169] (vii) a heavy chain comprising an amino acid sequence at least 85% identical to SEQ ID NO: 84; and/or a light chain comprising an amino acid sequence at least 85% identical to SEQ ID NO: 85;

[1170] (viii) a heavy chain comprising an amino acid sequence at least 85% identical to SEQ ID NO: 92; and/or a light chain comprising an amino acid sequence at least 85% identical to SEQ ID NO: 93;

[1171] (ix) a heavy chain comprising an amino acid sequence at least 85% identical to SEQ ID NO: 94; and/or a light chain comprising an amino acid sequence at least 85% identical to SEQ ID NO: 95; or

[1172] (x) a heavy chain comprising an amino acid sequence at least 85% identical to SEQ ID NO: 92; and/or a light chain comprising an amino acid sequence at least 85% identical to SEQ ID NO: 95.

[1173] C6. The complex of embodiment C3, wherein the antibody is a Fab fragment.

[1174] C7. The complex of embodiment C6, wherein the antibody comprises:

[1175] (i) a heavy chain comprising an amino acid sequence at least 85% identical to SEQ ID NO: 101; and/or a light chain comprising an amino acid sequence at least 85% identical to SEQ ID NO: 90;

[1176] (ii) a heavy chain comprising an amino acid sequence at least 85% identical to SEQ ID NO: 98; and/or a light chain comprising an amino acid sequence at least 85% identical to SEQ ID NO: 85;

[1177] (iii) a heavy chain comprising an amino acid sequence at least 85% identical to SEQ ID NO: 99; and/or a light chain comprising an amino acid sequence at least 85% identical to SEQ ID NO: 85;

[1178] (iv) a heavy chain comprising an amino acid sequence at least 85% identical to SEQ ID NO: 100; and/or a light chain comprising an amino acid sequence at least 85% identical to SEQ ID NO: 89;

[1179] (v) a heavy chain comprising an amino acid sequence at least 85% identical to SEQ ID NO: 100; and/or a light chain comprising an amino acid sequence at least 85% identical to SEQ ID NO: 90;

[1180] (vi) a heavy chain comprising an amino acid sequence at least 85% identical to SEQ ID NO: 101; and/or a light chain comprising an amino acid sequence at least 85% identical to SEQ ID NO: 89;

[1181] (vii) a heavy chain comprising an amino acid sequence at least 85% identical to SEQ ID NO: 97; and/or a light chain comprising an amino acid sequence at least 85% identical to SEQ ID NO: 85;

[1182] (viii) a heavy chain comprising an amino acid sequence at least 85% identical to SEQ ID NO: 102; and/or a light chain comprising an amino acid sequence at least 85% identical to SEQ ID NO: 93;

[1183] (ix) a heavy chain comprising an amino acid sequence at least 85% identical to SEQ ID NO: 103; and/or a light chain comprising an amino acid sequence at least 85% identical to SEQ ID NO: 95; or

[1184] (x) a heavy chain comprising an amino acid sequence at least 85% identical to SEQ ID NO: 102; and/or a light chain comprising an amino acid sequence at least 85% identical to SEQ ID NO: 95.

[1185] C8. The complex of embodiment C6 or embodiment C7, wherein the antibody comprises:

[1186] (i) a heavy chain comprising the amino acid sequence of SEQ ID NO: 101; and a light chain comprising the amino acid sequence of SEQ ID NO: 90;

[1187] (ii) a heavy chain comprising the amino acid sequence of SEQ ID NO: 98; and a light chain comprising the amino acid sequence of SEQ ID NO: 85;

[1188] (iii) a heavy chain comprising the amino acid sequence of SEQ ID NO: 99; and a light chain comprising the amino acid sequence of SEQ ID NO: 85;

[1189] (iv) a heavy chain comprising the amino acid sequence of SEQ ID NO: 100; and a light chain comprising the amino acid sequence of SEQ ID NO: 89;

[1190] (v) a heavy chain comprising the amino acid sequence of SEQ ID NO: 100; and a light chain comprising the amino acid sequence of SEQ ID NO: 90;

[1191] (vi) a heavy chain comprising the amino acid sequence of SEQ ID NO: 97; and a light chain comprising the amino acid sequence of SEQ ID NO: 85;

[1192] (vii) a heavy chain comprising the amino acid sequence of SEQ ID NO: 101; and a light chain comprising the amino acid sequence of SEQ ID NO: 90;

[1193] (viii) a heavy chain comprising the amino acid sequence of SEQ ID NO: 102; and a light chain comprising the amino acid sequence of SEQ ID NO: 93;

[1194] (ix) a heavy chain comprising the amino acid sequence of SEQ ID NO: 103; and a light chain comprising the amino acid sequence of SEQ ID NO: 95; or

[1195] (x) a heavy chain comprising the amino acid sequence of SEQ ID NO: 102; and a light chain comprising the amino acid sequence of SEQ ID NO: 95.

[1196] C9. The complex of any one of embodiments C1 to C8, wherein the equilibrium dissociation constant (K_{D}) of binding of the antibody to the transferrin receptor is in a range from 10⁻¹¹ M to 10⁻⁶ M.

[1197] C10. The complex of any one of embodiments C1 to C9, wherein the antibody does not specifically bind to the transferrin binding site of the transferrin receptor and/or wherein the antibody does not inhibit binding of transferrin to the transferrin receptor.

[1198] C11. The complex of any one of embodiments C1 to C10, wherein the antibody is cross-reactive with extracellular epitopes of two or more of a human, non-human primate and rodent transferrin receptor.

[1199] C12. The complex of any one of embodiments C1 to C11, wherein the complex is configured to promote transferrin receptor mediated internalization of the molecular payload into a muscle cell.

[1200] C13. The complex of any one of embodiments C1 to C12, wherein the molecular payload is an oligonucleotide comprising an antisense strand comprising a region of complementarity to a ACVR1 target sequence, optionally wherein the ACVR1 target sequence is an ACVR1 mRNA sequence as set forth in SEQ ID NO: 429 or SEQ ID NO: 430, or an ACVR1 target sequence as set forth in any one of SEQ ID NOs: 431-478.

[1201] C14. The complex of embodiment C13, wherein the antisense strand is 18-25 nucleotides in length and/or the region of complementarity is at least 16 nucleosides in length.

[1202] C15. The complex of embodiment C13 or embodiment C14, wherein the antisense strand comprises at least 16 consecutive nucleotides of a nucleotide sequence set forth in any one of SEQ ID NOs: 479-502, wherein each of the Us are optionally and independently Ts, optionally wherein the antisense strand comprises the nucleotide sequence of any one of SEQ ID NOs: 479-502, wherein each of the Us are optionally and independently Ts.

[1203] C16. The complex of any one of embodiments C13-C15, wherein the oligonucleotide further comprises a sense strand that hybridizes to the antisense strand to form a double stranded siRNA.

[1204] C17. The complex of any one of embodiments C13 to C16, wherein the oligonucleotide comprises one or more modified nucleosides, optionally wherein each nucleoside in the oligonucleotide is a modified nucleoside.

[1205] C18. The complex of embodiment 17, wherein the one or more modified nucleosides are 2′ modified nucleotides, optionally wherein the one or more 2′ modified nucleosides are selected from: 2′-fluoro (2′-F), 2′-O-methyl (2′-O-Me), 2′-O-methoxyethyl (2′-MOE), 2′-O-aminopropyl (2′-O-AP), 2′-O-dimethylaminoethyl (2′-O-DMAOE), 2′-O-dimethylaminopropyl (2′-O-DMAP), 2′-O-dimethylaminoethyloxyethyl (2′-O-DMAEOE), 2′-O—N-methylacetamido (2′-O-NMA), locked nucleic acid (LNA), ethylene-bridged nucleic acid (ENA), and (S)-constrained ethyl-bridged nucleic acid (cEt), optionally wherein the 2′ modified nucleotide is 2′-O-methyl or 2′-fluoro (2′-F).

[1206] C19. The complex of any one of embodiments C13 to C18, wherein the oligonucleotide comprises one or more phosphorothioate internucleoside linkages.

[1207] C20. The complex of embodiment C19, wherein the one or more phosphorothioate internucleoside linkage are present on the antisense strand of the RNAi oligonucleotide, further optionally wherein the two internucleoside linkages at the 3′ end of the sense strands are phosphorothioate internucleoside linkages.

[1208] C21. The complex of any one of embodiments C13 to C20, wherein the oligonucleotide is an siRNA listed in Table 19.

[1209] C22. The complex of any one of embodiments C1 to C21, wherein the antibody is covalently linked to the molecular payload via

[1210] (i) a cleavable linker, optionally wherein the cleavable linker comprises a valine-citrulline sequence; or

[1211] (ii) a non-cleavable linker, optionally wherein the non-cleavable linker is an alkane linker.

[1212] C23. A method of reducing ACVR1 expression in a muscle cell, the method comprising contacting the muscle cell with an effective amount of the complex of any one of embodiments C1 to C21 for promoting internalization of the molecular payload to the muscle cell.

[1213] C24. A method of treating a subject having a disease associated with elevated level of ACVR1, the method comprising administering to the subject an effective amount of the complex of any one of embodiments C1 to C21, optionally wherein the disease is muscle atrophy, further optionally wherein the muscle atrophy is sarcopenia or cachexia.

[1214] C25. The method of embodiment C23 or embodiment C24, wherein the complex reduces ACVR1 RNA level.

[1215] C26. The method of any one of embodiments C23 to C25, wherein the complex reduces ACVR1 protein level.

[1216] D1. A complex comprising an anti-transferrin receptor 1 antibody covalently linked to a molecular payload that modulates the expression or activity of atrogin-1 (FBXO32) or tripartite motif containing 63 (TRIM63), wherein the antibody comprises:

[1217] (i) a heavy chain variable region (VH) comprising an amino acid sequence at least 85% identical to SEQ ID NO: 76; and/or a light chain variable region (VL) comprising an amino acid sequence at least 85% identical to SEQ ID NO: 75;

[1218] (ii) a heavy chain variable region (VH) comprising an amino acid sequence at least 85% identical to SEQ ID NO: 71; and/or a light chain variable region (VL) comprising an amino acid sequence at least 85% identical to SEQ ID NO: 70;

[1219] (iii) a heavy chain variable region (VH) comprising an amino acid sequence at least 85% identical to SEQ ID NO: 72; and/or a light chain variable region (VL) comprising an amino acid sequence at least 85% identical to SEQ ID NO: 70;

[1220] (iv) a heavy chain variable region (VH) comprising an amino acid sequence at least 85% identical to SEQ ID NO: 73; and/or a light chain variable region (VL) comprising an amino acid sequence at least 85% identical to SEQ ID NO: 74;

[1221] (v) a heavy chain variable region (VH) comprising an amino acid sequence at least 85% identical to SEQ ID NO: 73; and/or a light chain variable region (VL) comprising an amino acid sequence at least 85% identical to SEQ ID NO: 75;

[1222] (vi) a heavy chain variable region (VH) comprising an amino acid sequence at least 85% identical to SEQ ID NO: 76; and/or a light chain variable region (VL) comprising an amino acid sequence at least 85% identical to SEQ ID NO: 74;

[1223] (vii) a heavy chain variable region (VH) comprising an amino acid sequence at least 85% identical to SEQ ID NO: 69; and/or a light chain variable region (VL) comprising an amino acid sequence at least 85% identical to SEQ ID NO: 70;

[1224] (viii) a heavy chain variable region (VH) comprising an amino acid sequence at least 85% identical to SEQ ID NO: 77; and/or a light chain variable region (VL) comprising an amino acid sequence at least 85% identical to SEQ ID NO: 78;

[1225] (ix) a heavy chain variable region (VH) comprising an amino acid sequence at least 85% identical to SEQ ID NO: 79; and/or a light chain variable region (VL) comprising an amino acid sequence at least 85% identical to SEQ ID NO: 80; or

[1226] (x) a heavy chain variable region (VH) comprising an amino acid sequence at least 85% identical to SEQ ID NO: 77; and/or a light chain variable region (VL) comprising an amino acid sequence at least 85% identical to SEQ ID NO: 80.

[1227] D2. The complex of embodiment D1, wherein the antibody comprises:

[1228] (i) a VH comprising the amino acid sequence of SEQ ID NO: 76 and a VL comprising the amino acid sequence of SEQ ID NO: 75;

[1229] (ii) a VH comprising the amino acid sequence of SEQ ID NO: 71 and a VL comprising the amino acid sequence of SEQ ID NO: 70;

[1230] (iii) a VH comprising the amino acid sequence of SEQ ID NO: 72 and a VL comprising the amino acid sequence of SEQ ID NO: 70;

[1231] (iv) a VH comprising the amino acid sequence of SEQ ID NO: 73 and a VL comprising the amino acid sequence of SEQ ID NO: 74;

[1232] (v) a VH comprising the amino acid sequence of SEQ ID NO: 73 and a VL comprising the amino acid sequence of SEQ ID NO: 75;

[1233] (vi) a VH comprising the amino acid sequence of SEQ ID NO: 76 and a VL comprising the amino acid sequence of SEQ ID NO: 74;

[1234] (vii) a VH comprising the amino acid sequence of SEQ ID NO: 69 and a VL comprising the amino acid sequence of SEQ ID NO: 70;

[1235] (viii) a VH comprising the amino acid sequence of SEQ ID NO: 77 and a VL comprising the amino acid sequence of SEQ ID NO: 78;

[1236] (ix) a VH comprising the amino acid sequence of SEQ ID NO: 79 and a VL comprising the amino acid sequence of SEQ ID NO: 80; or

[1237] (x) a VH comprising the amino acid sequence of SEQ ID NO: 77 and a VL comprising the amino acid sequence of SEQ ID NO: 80.

[1238] D3. The complex of embodiment D1 or embodiment D2, wherein the antibody is selected from the group consisting of a full-length IgG, a Fab fragment, a Fab′ fragment, a F(ab′)2 fragment, a scFv, and a Fv.

[1239] D4. The complex of embodiment D3, wherein the antibody is a full-length IgG, optionally wherein the full-length IgG comprises a heavy chain constant region of the isotype IgG1, IgG2, IgG3, or IgG4.

[1240] D5. The complex of embodiment D4, wherein the antibody comprises:

[1241] (i) a heavy chain comprising an amino acid sequence at least 85% identical to SEQ ID NO: 91; and/or a light chain comprising an amino acid sequence at least 85% identical to SEQ ID NO: 90;

[1242] (ii) a heavy chain comprising an amino acid sequence at least 85% identical to SEQ ID NO: 86; and/or a light chain comprising an amino acid sequence at least 85% identical to SEQ ID NO: 85;

[1243] (iii) a heavy chain comprising an amino acid sequence at least 85% identical to SEQ ID NO: 87; and/or a light chain comprising an amino acid sequence at least 85% identical to SEQ ID NO: 85;

[1244] (iv) a heavy chain comprising an amino acid sequence at least 85% identical to SEQ ID NO: 88; and/or a light chain comprising an amino acid sequence at least 85% identical to SEQ ID NO: 89;

[1245] (v) a heavy chain comprising an amino acid sequence at least 85% identical to SEQ ID NO: 88; and/or a light chain comprising an amino acid sequence at least 85% identical to SEQ ID NO: 90;

[1246] (vi) a heavy chain comprising an amino acid sequence at least 85% identical to SEQ ID NO: 91; and/or a light chain comprising an amino acid sequence at least 85% identical to SEQ ID NO: 89;

[1247] (vii) a heavy chain comprising an amino acid sequence at least 85% identical to SEQ ID NO: 84; and/or a light chain comprising an amino acid sequence at least 85% identical to SEQ ID NO: 85;

[1248] (viii) a heavy chain comprising an amino acid sequence at least 85% identical to SEQ ID NO: 92; and/or a light chain comprising an amino acid sequence at least 85% identical to SEQ ID NO: 93;

[1249] (ix) a heavy chain comprising an amino acid sequence at least 85% identical to SEQ ID NO: 94; and/or a light chain comprising an amino acid sequence at least 85% identical to SEQ ID NO: 95; or

[1250] (x) a heavy chain comprising an amino acid sequence at least 85% identical to SEQ ID NO: 92; and/or a light chain comprising an amino acid sequence at least 85% identical to SEQ ID NO: 95.

[1251] D6. The complex of embodiment D3, wherein the antibody is a Fab fragment.

[1252] D7. The complex of embodiment D6, wherein the antibody comprises:

[1253] (i) a heavy chain comprising an amino acid sequence at least 85% identical to SEQ ID NO: 101; and/or a light chain comprising an amino acid sequence at least 85% identical to SEQ ID NO: 90;

[1254] (ii) a heavy chain comprising an amino acid sequence at least 85% identical to SEQ ID NO: 98; and/or a light chain comprising an amino acid sequence at least 85% identical to SEQ ID NO: 85;

[1255] (iii) a heavy chain comprising an amino acid sequence at least 85% identical to SEQ ID NO: 99; and/or a light chain comprising an amino acid sequence at least 85% identical to SEQ ID NO: 85;

[1256] (iv) a heavy chain comprising an amino acid sequence at least 85% identical to SEQ ID NO: 100; and/or a light chain comprising an amino acid sequence at least 85% identical to SEQ ID NO: 89;

[1257] (v) a heavy chain comprising an amino acid sequence at least 85% identical to SEQ ID NO: 100; and/or a light chain comprising an amino acid sequence at least 85% identical to SEQ ID NO: 90;

[1258] (vi) a heavy chain comprising an amino acid sequence at least 85% identical to SEQ ID NO: 101; and/or a light chain comprising an amino acid sequence at least 85% identical to SEQ ID NO: 89;

[1259] (vii) a heavy chain comprising an amino acid sequence at least 85% identical to SEQ ID NO: 97; and/or a light chain comprising an amino acid sequence at least 85% identical to SEQ ID NO: 85;

[1260] (viii) a heavy chain comprising an amino acid sequence at least 85% identical to SEQ ID NO: 102; and/or a light chain comprising an amino acid sequence at least 85% identical to SEQ ID NO: 93;

[1261] (ix) a heavy chain comprising an amino acid sequence at least 85% identical to SEQ ID NO: 103; and/or a light chain comprising an amino acid sequence at least 85% identical to SEQ ID NO: 95; or

[1262] (x) a heavy chain comprising an amino acid sequence at least 85% identical to SEQ ID NO: 102; and/or a light chain comprising an amino acid sequence at least 85% identical to SEQ ID NO: 95.

[1263] D8. The complex of embodiment D6 or embodiment D7, wherein the antibody comprises:

[1264] (i) a heavy chain comprising the amino acid sequence of SEQ ID NO: 101; and a light chain comprising the amino acid sequence of SEQ ID NO: 90;

[1265] (ii) a heavy chain comprising the amino acid sequence of SEQ ID NO: 98; and a light chain comprising the amino acid sequence of SEQ ID NO: 85;

[1266] (iii) a heavy chain comprising the amino acid sequence of SEQ ID NO: 99; and a light chain comprising the amino acid sequence of SEQ ID NO: 85;

[1267] (iv) a heavy chain comprising the amino acid sequence of SEQ ID NO: 100; and a light chain comprising the amino acid sequence of SEQ ID NO: 89;

[1268] (v) a heavy chain comprising the amino acid sequence of SEQ ID NO: 100; and a light chain comprising the amino acid sequence of SEQ ID NO: 90;

[1269] (vi) a heavy chain comprising the amino acid sequence of SEQ ID NO: 101; and a light chain comprising the amino acid sequence of SEQ ID NO: 89;

[1270] (vii) a heavy chain comprising the amino acid sequence of SEQ ID NO: 97; and a light chain comprising the amino acid sequence of SEQ ID NO: 85;

[1271] (viii) a heavy chain comprising the amino acid sequence of SEQ ID NO: 102; and a light chain comprising the amino acid sequence of SEQ ID NO: 93;

[1272] (ix) a heavy chain comprising the amino acid sequence of SEQ ID NO: 103; and a light chain comprising the amino acid sequence of SEQ ID NO: 95; or

[1273] (x) a heavy chain comprising the amino acid sequence of SEQ ID NO: 102; and a light chain comprising the amino acid sequence of SEQ ID NO: 95.

[1274] D9. The complex of any one of embodiments D1 to D8, wherein the equilibrium dissociation constant (K_{D}) of binding of the antibody to the transferrin receptor is in a range from 10⁻¹¹ M to 10⁻⁶ M.

[1275] D10. The complex of any one of embodiments D1 to D9, wherein the antibody does not specifically bind to the transferrin binding site of the transferrin receptor and/or wherein the antibody does not inhibit binding of transferrin to the transferrin receptor.

[1276] D11. The complex of any one of embodiments D1 to D10, wherein the antibody is cross-reactive with extracellular epitopes of two or more of a human, non-human primate and rodent transferrin receptor.

[1277] D12. The complex of any one of embodiments D1 to D11, wherein the complex is configured to promote transferrin receptor mediated internalization of the molecular payload into a muscle cell.

[1278] D13. The complex of any one of embodiments D1 to D12, wherein the molecular payload is an oligonucleotide comprising an antisense strand comprising a region of complementarity to a FBXO32 target sequence, optionally wherein the FBXO32 target sequence is an FBXO32 mRNA sequence as set forth in SEQ ID NO: 505 or SEQ ID NO: 506, or a FBXO32 target sequence as set forth in any one of SEQ ID NOs: 507-554, further optionally wherein the antisense strand is 18-25 nucleotides in length and/or the region of complementarity is at least 16 nucleosides in length.

[1279] D14. The complex of embodiment D13, wherein the antisense strand comprises at least 16 consecutive nucleotides of a nucleotide sequence set forth in any one of SEQ ID NOs: 555-578, wherein each of the Us are optionally and independently Ts, optionally wherein the antisense strand comprises the nucleotide sequence of any one of SEQ ID NOs: 555-578, wherein each of the Us are optionally and independently Ts.

[1280] D15. The complex of any one of embodiments D1 to D12, wherein the molecular payload is an oligonucleotide comprising an antisense strand comprising a region of complementarity to TRIM63 target sequence, optionally wherein the TRIM63 target sequence is a TRIM63 mRNA sequence as set forth in SEQ ID NO: 579 or SEQ ID NO: 580, or a TRIM63 target sequence as set forth in any one of SEQ ID NOs: 581-628, further optionally wherein the antisense strand is 18-25 nucleotides in length and/or the region of complementarity is at least 16 nucleosides in length.

[1281] D16. The complex of embodiment D15, wherein the antisense strand comprises at least 16 consecutive nucleotides of a nucleotide sequence set forth in any one of SEQ ID NOs: 629-652, wherein each of the Us are optionally and independently Ts, optionally wherein the antisense strand comprises the nucleotide sequence of any one of SEQ ID NOs: 629-652, wherein each of the Us are optionally and independently Ts.

[1282] D17. The complex of any one of embodiments D13 to D16, wherein the oligonucleotide further comprises a sense strand that hybridizes to the antisense strand to form a double stranded siRNA.

[1283] D18. The complex of any one of embodiments D13 to D17, wherein the oligonucleotide comprises one or more modified nucleosides, optionally wherein each nucleoside in the oligonucleotide is a modified nucleoside.

[1284] D19. The complex of embodiment D18, wherein the one or more modified nucleosides are 2′ modified nucleotides, optionally wherein the one or more 2′ modified nucleosides are selected from: 2′-fluoro (2′-F), 2′-O-methyl (2′-O-Me), 2′-O-methoxyethyl (2′-MOE), 2′-O-aminopropyl (2′-O-AP), 2′-O-dimethylaminoethyl (2′-O-DMAOE), 2′-O-dimethylaminopropyl (2′-O-DMAP), 2′-O-dimethylaminoethyloxyethyl (2′-O-DMAEOE), 2′-O—N-methylacetamido (2′-O-NMA), locked nucleic acid (LNA), ethylene-bridged nucleic acid (ENA), and (S)-constrained ethyl-bridged nucleic acid (cEt), optionally wherein the 2′ modified nucleotide is 2′-O-methyl or 2′-fluoro (2′-F).

[1285] D20. The complex of any one of embodiments D13 to D19, wherein the oligonucleotide comprises one or more phosphorothioate internucleoside linkages, optionally wherein the one or more phosphorothioate internucleoside linkage are present on the antisense strand of the RNAi oligonucleotide, further optionally wherein the two internucleoside linkages at the 3′ end of the sense strands are phosphorothioate internucleoside linkages.

[1286] D21. The complex of any one of embodiments D13, D14, and D17 to D20, wherein the oligonucleotide is an siRNA listed in Table 22.

[1287] D22. The complex of any one of embodiments D15 to D20, wherein the oligonucleotide is an siRNA listed in Table 25.

[1288] D23. The complex of any one of embodiments D1 to D22, wherein the antibody is covalently linked to the molecular payload via

[1289] (i) a cleavable linker, optionally wherein the cleavable linker comprises a valine-citrulline dipeptide sequence; or

[1290] (ii) a non-cleavable linker, optionally wherein the non-cleavable linker is an alkane linker.

[1291] D24. A method of reducing FBXO32 or TRIM63 expression in a muscle cell, the method comprising contacting the muscle cell with an effective amount of the complex of any one of embodiments 1-23 for promoting internalization of the molecular payload to the muscle cell.

[1292] D25. A method of treating muscle atrophy the method comprising administering to a subject in need thereof an effective amount of the complex of any one of embodiments 1-23, wherein the subject has elevated expression or activity of FBXO32 or TRIM63.

[1293] D26. The method of embodiment D24 or embodiment D25, wherein the complex reduces RNA level of FBXO32 or TRIM63.

[1294] D27. The method of any one of embodiments D24 to D26, wherein the complex reduces protein level of FBXO32 or TRIM63.

[1295] E1. A complex comprising an anti-transferrin receptor 1 antibody covalently linked to a molecular payload that modulates the expression or activity of MEF2D, KLF15, MED1, MED13, or PPP1R3A, wherein the antibody comprises:

[1296] (i) a heavy chain variable region (VH) comprising an amino acid sequence at least 85% identical to SEQ ID NO: 76; and/or a light chain variable region (VL) comprising an amino acid sequence at least 85% identical to SEQ ID NO: 75;

[1297] (ii) a heavy chain variable region (VH) comprising an amino acid sequence at least 85% identical to SEQ ID NO: 71; and/or a light chain variable region (VL) comprising an amino acid sequence at least 85% identical to SEQ ID NO: 70;

[1298] (iii) a heavy chain variable region (VH) comprising an amino acid sequence at least 85% identical to SEQ ID NO: 72; and/or a light chain variable region (VL) comprising an amino acid sequence at least 85% identical to SEQ ID NO: 70;

[1299] (iv) a heavy chain variable region (VH) comprising an amino acid sequence at least 85% identical to SEQ ID NO: 73; and/or a light chain variable region (VL) comprising an amino acid sequence at least 85% identical to SEQ ID NO: 74;

[1300] (v) a heavy chain variable region (VH) comprising an amino acid sequence at least 85% identical to SEQ ID NO: 73; and/or a light chain variable region (VL) comprising an amino acid sequence at least 85% identical to SEQ ID NO: 75;

[1301] (vi) a heavy chain variable region (VH) comprising an amino acid sequence at least 85% identical to SEQ ID NO: 76; and/or a light chain variable region (VL) comprising an amino acid sequence at least 85% identical to SEQ ID NO: 74;

[1302] (vii) a heavy chain variable region (VH) comprising an amino acid sequence at least 85% identical to SEQ ID NO: 69; and/or a light chain variable region (VL) comprising an amino acid sequence at least 85% identical to SEQ ID NO: 70;

[1303] (viii) a heavy chain variable region (VH) comprising an amino acid sequence at least 85% identical to SEQ ID NO: 77; and/or a light chain variable region (VL) comprising an amino acid sequence at least 85% identical to SEQ ID NO: 78;

[1304] (ix) a heavy chain variable region (VH) comprising an amino acid sequence at least 85% identical to SEQ ID NO: 79; and/or a light chain variable region (VL) comprising an amino acid sequence at least 85% identical to SEQ ID NO: 80; or

[1305] (x) a heavy chain variable region (VH) comprising an amino acid sequence at least 85% identical to SEQ ID NO: 77; and/or a light chain variable region (VL) comprising an amino acid sequence at least 85% identical to SEQ ID NO: 80.

[1306] E2. The complex of embodiment E1, wherein the antibody comprises:

[1307] (i) a VH comprising the amino acid sequence of SEQ ID NO: 76 and a VL comprising the amino acid sequence of SEQ ID NO: 75;

[1308] (ii) a VH comprising the amino acid sequence of SEQ ID NO: 71 and a VL comprising the amino acid sequence of SEQ ID NO: 70;

[1309] (iii) a VH comprising the amino acid sequence of SEQ ID NO: 72 and a VL comprising the amino acid sequence of SEQ ID NO: 70;

[1310] (iv) a VH comprising the amino acid sequence of SEQ ID NO: 73 and a VL comprising the amino acid sequence of SEQ ID NO: 74;

[1311] (v) a VH comprising the amino acid sequence of SEQ ID NO: 73 and a VL comprising the amino acid sequence of SEQ ID NO: 75;

[1312] (vi) a VH comprising the amino acid sequence of SEQ ID NO: 76 and a VL comprising the amino acid sequence of SEQ ID NO: 74;

[1313] (vii) a VH comprising the amino acid sequence of SEQ ID NO: 69 and a VL comprising the amino acid sequence of SEQ ID NO: 70;

[1314] (viii) a VH comprising the amino acid sequence of SEQ ID NO: 77 and a VL comprising the amino acid sequence of SEQ ID NO: 78;

[1315] (ix) a VH comprising the amino acid sequence of SEQ ID NO: 79 and a VL comprising the amino acid sequence of SEQ ID NO: 80; or

[1316] (x) a VH comprising the amino acid sequence of SEQ ID NO: 77 and a VL comprising the amino acid sequence of SEQ ID NO: 80.

[1317] E3. The complex of embodiment E1 or embodiment E2, wherein the antibody is selected from the group consisting of a full-length IgG, a Fab fragment, a Fab′ fragment, a F(ab′)2 fragment, a scFv, and a Fv.

[1318] E4. The complex of embodiment E3, wherein the antibody is a full-length IgG, optionally wherein the full-length IgG comprises a heavy chain constant region of the isotype IgG1, IgG2, IgG3, or IgG4.

[1319] E5. The complex of embodiment E4, wherein the antibody comprises:

[1320] (i) a heavy chain comprising an amino acid sequence at least 85% identical to SEQ ID NO: 91; and/or a light chain comprising an amino acid sequence at least 85% identical to SEQ ID NO: 90;

[1321] (ii) a heavy chain comprising an amino acid sequence at least 85% identical to SEQ ID NO: 86; and/or a light chain comprising an amino acid sequence at least 85% identical to SEQ ID NO: 85;

[1322] (iii) a heavy chain comprising an amino acid sequence at least 85% identical to SEQ ID NO: 87; and/or a light chain comprising an amino acid sequence at least 85% identical to SEQ ID NO: 85;

[1323] (iv) a heavy chain comprising an amino acid sequence at least 85% identical to SEQ ID NO: 88; and/or a light chain comprising an amino acid sequence at least 85% identical to SEQ ID NO: 89;

[1324] (v) a heavy chain comprising an amino acid sequence at least 85% identical to SEQ ID NO: 88; and/or a light chain comprising an amino acid sequence at least 85% identical to SEQ ID NO: 90;

[1325] (vi) a heavy chain comprising an amino acid sequence at least 85% identical to SEQ ID NO: 91; and/or a light chain comprising an amino acid sequence at least 85% identical to SEQ ID NO: 89;

[1326] (vii) a heavy chain comprising an amino acid sequence at least 85% identical to SEQ ID NO: 84; and/or a light chain comprising an amino acid sequence at least 85% identical to SEQ ID NO: 85;

[1327] (viii) a heavy chain comprising an amino acid sequence at least 85% identical to SEQ ID NO: 92; and/or a light chain comprising an amino acid sequence at least 85% identical to SEQ ID NO: 93;

[1328] (ix) a heavy chain comprising an amino acid sequence at least 85% identical to SEQ ID NO: 94; and/or a light chain comprising an amino acid sequence at least 85% identical to SEQ ID NO: 95; or

[1329] (x) a heavy chain comprising an amino acid sequence at least 85% identical to SEQ ID NO: 92; and/or a light chain comprising an amino acid sequence at least 85% identical to SEQ ID NO: 95.

[1330] E6. The complex of embodiment E3, wherein the antibody is a Fab fragment.

[1331] E7. The complex of embodiment E6, wherein the antibody comprises:

[1332] (i) a heavy chain comprising an amino acid sequence at least 85% identical to SEQ ID NO: 101; and/or a light chain comprising an amino acid sequence at least 85% identical to SEQ ID NO: 90;

[1333] (ii) a heavy chain comprising an amino acid sequence at least 85% identical to SEQ ID NO: 98; and/or a light chain comprising an amino acid sequence at least 85% identical to SEQ ID NO: 85;

[1334] (iii) a heavy chain comprising an amino acid sequence at least 85% identical to SEQ ID NO: 99; and/or a light chain comprising an amino acid sequence at least 85% identical to SEQ ID NO: 85;

[1335] (iv) a heavy chain comprising an amino acid sequence at least 85% identical to SEQ ID NO: 100; and/or a light chain comprising an amino acid sequence at least 85% identical to SEQ ID NO: 89;

[1336] (v) a heavy chain comprising an amino acid sequence at least 85% identical to SEQ ID NO: 100; and/or a light chain comprising an amino acid sequence at least 85% identical to SEQ ID NO: 90;

[1337] (vi) a heavy chain comprising an amino acid sequence at least 85% identical to SEQ ID NO: 101; and/or a light chain comprising an amino acid sequence at least 85% identical to SEQ ID NO: 89;

[1338] (vii) a heavy chain comprising an amino acid sequence at least 85% identical to SEQ ID NO: 97; and/or a light chain comprising an amino acid sequence at least 85% identical to SEQ ID NO: 85;

[1339] (viii) a heavy chain comprising an amino acid sequence at least 85% identical to SEQ ID NO: 102; and/or a light chain comprising an amino acid sequence at least 85% identical to SEQ ID NO: 93;

[1340] (ix) a heavy chain comprising an amino acid sequence at least 85% identical to SEQ ID NO: 103; and/or a light chain comprising an amino acid sequence at least 85% identical to SEQ ID NO: 95; or

[1341] (x) a heavy chain comprising an amino acid sequence at least 85% identical to SEQ ID NO: 102; and/or a light chain comprising an amino acid sequence at least 85% identical to SEQ ID NO: 95.

[1342] E8. The complex of embodiment E6 or embodiment E7, wherein the antibody comprises:

[1343] (i) a heavy chain comprising the amino acid sequence of SEQ ID NO: 101; and a light chain comprising the amino acid sequence of SEQ ID NO: 90;

[1344] (ii) a heavy chain comprising the amino acid sequence of SEQ ID NO: 98; and a light chain comprising the amino acid sequence of SEQ ID NO: 85;

[1345] (iii) a heavy chain comprising the amino acid sequence of SEQ ID NO: 99; and a light chain comprising the amino acid sequence of SEQ ID NO: 85;

[1346] (iv) a heavy chain comprising the amino acid sequence of SEQ ID NO: 100; and a light chain comprising the amino acid sequence of SEQ ID NO: 89;

[1347] (v) a heavy chain comprising the amino acid sequence of SEQ ID NO: 100; and a light chain comprising the amino acid sequence of SEQ ID NO: 90;

[1348] (vi) a heavy chain comprising the amino acid sequence of SEQ ID NO: 101; and a light chain comprising the amino acid sequence of SEQ ID NO: 89;

[1349] (vii) a heavy chain comprising the amino acid sequence of SEQ ID NO: 97; and a light chain comprising the amino acid sequence of SEQ ID NO: 85;

[1350] (viii) a heavy chain comprising the amino acid sequence of SEQ ID NO: 102; and a light chain comprising the amino acid sequence of SEQ ID NO: 93;

[1351] (ix) a heavy chain comprising the amino acid sequence of SEQ ID NO: 103; and a light chain comprising the amino acid sequence of SEQ ID NO: 95; or

[1352] (x) a heavy chain comprising the amino acid sequence of SEQ ID NO: 102; and a light chain comprising the amino acid sequence of SEQ ID NO: 95.

[1353] E9. The complex of any one of embodiments E1 to E8, wherein the equilibrium dissociation constant (K_{D}) of binding of the antibody to the transferrin receptor is in a range from 10⁻¹¹ M to 10⁻⁶ M.

[1354] E10. The complex of any one of embodiments E1 to E9, wherein the antibody does not specifically bind to the transferrin binding site of the transferrin receptor and/or wherein the antibody does not inhibit binding of transferrin to the transferrin receptor.

[1355] E11. The complex of any one of embodiments E1 to E10, wherein the antibody is cross-reactive with extracellular epitopes of two or more of a human, non-human primate and rodent transferrin receptor.

[1356] E12. The complex of any one of embodiments E1 to E11, wherein the complex is configured to promote transferrin receptor mediated internalization of the molecular payload into a muscle cell.

[1357] E13. The complex of any one of embodiments E1 to E12, wherein the molecular payload is an oligonucleotide comprising an antisense strand comprising a region of complementarity to a MEF2D target sequence, optionally wherein the MEF2D target sequence is an MEF2D mRNA sequence as set forth in SEQ ID NO: 664 or SEQ ID NO: 665, or a MEF2D target sequence as set forth in any one of SEQ ID NOs: 668-715, further optionally wherein the antisense strand is 18-25 nucleotides in length and/or the region of complementarity is at least 16 nucleosides in length.

[1358] E14. The complex of embodiment E13, wherein the antisense strand comprises at least 16 consecutive nucleotides of a nucleotide sequence set forth in any one of SEQ ID NOs: 716-223,

[1359] wherein each of the Us are optionally and independently Ts, optionally wherein the antisense strand comprises the nucleotide sequence of any one of SEQ ID NOs: 716-223, wherein each of the Us are optionally and independently Ts.

[1360] E15. The complex of any one of embodiments E1 to E12, wherein the molecular payload is an oligonucleotide comprising an antisense strand comprising a region of complementarity to KLF15 mRNA, optionally wherein the KLF15 target sequence is a KLF15 mRNA sequence as set forth in SEQ ID NO: 740 or SEQ ID NO: 741, or a KLF15 target sequence as set forth in any one of SEQ ID NOs: 742-789, further optionally wherein the antisense strand is 18-25 nucleotides in length and/or the region of complementarity is at least 16 nucleosides in length.

[1361] E16. The complex of embodiment E15, wherein the antisense strand comprises at least 16 consecutive nucleotides of a nucleotide sequence set forth in any one of SEQ ID NOs: 790-813,

[1362] wherein each of the Us are optionally and independently Ts, optionally wherein the antisense strand comprises the nucleotide sequence of any one of SEQ ID NOs: 790-813, wherein each of the Us are optionally and independently Ts.

[1363] E17. The complex of any one of embodiments E1 to E12, wherein the molecular payload is an oligonucleotide comprising an antisense strand comprising a region of complementarity to MED1 mRNA, optionally wherein the MED1 target sequence is a MED1 mRNA sequence as set forth in SEQ ID NO: 814 or SEQ ID NO: 815, or a MED1 target sequence as set forth in any one of SEQ ID NOs: 816-863, further optionally wherein the antisense strand is 18-25 nucleotides in length and/or the region of complementarity is at least 16 nucleosides in length.

[1364] E18. The complex of embodiment E17, wherein the antisense strand comprises at least 16 consecutive nucleotides of a nucleotide sequence set forth in any one of SEQ ID NOs: 864-887,

[1365] wherein each of the Us are optionally and independently Ts, optionally wherein the antisense strand comprises the nucleotide sequence of any one of SEQ ID NOs: 864-887, wherein each of the Us are optionally and independently Ts.

[1366] E19. The complex of any one of embodiments E1 to E12, wherein the molecular payload is an oligonucleotide comprising an antisense strand comprising a region of complementarity to MED13 mRNA, optionally wherein the MED13 target sequence is a MED13 mRNA sequence as set forth in SEQ ID NO: 888 or SEQ ID NO: 889, or a MED13 target sequence as set forth in any one of SEQ ID NOs: 890-937, further optionally wherein the antisense strand is 18-25 nucleotides in length and/or the region of complementarity is at least 16 nucleosides in length.

[1367] E20. The complex of embodiment E19, wherein the antisense strand comprises at least 16 consecutive nucleotides of a nucleotide sequence set forth in any one of SEQ ID NOs: 938-961,

[1368] wherein each of the Us are optionally and independently Ts, optionally wherein the antisense strand comprises the nucleotide sequence of any one of SEQ ID NOs: 938-961, wherein each of the Us are optionally and independently Ts.

[1369] E21. The complex of any one of embodiments E1 to E12, wherein the molecular payload is an oligonucleotide comprising an antisense strand comprising a region of complementarity to PPP1R3A mRNA, optionally wherein the PPP1R3A target sequence is a PPP1R3A mRNA sequence as set forth in SEQ ID NO: 962 or SEQ ID NO: 963, or a PPP1R3A target sequence as set forth in any one of SEQ ID NOs: 964-1011, further optionally wherein the antisense strand is 18-25 nucleotides in length and/or the region of complementarity is at least 16 nucleosides in length.

[1370] E22. The complex of embodiment E21, wherein the antisense strand comprises at least 16 consecutive nucleotides of a nucleotide sequence set forth in any one of SEQ ID NOs: 1012-1035,

[1371] wherein each of the Us are optionally and independently Ts, optionally wherein the antisense strand comprises the nucleotide sequence of any one of SEQ ID NOs: 1012-1035, wherein each of the Us are optionally and independently Ts.

[1372] E23. The complex of any one of embodiments E13 to E22, wherein the oligonucleotide further comprises a sense strand that hybridizes to the antisense strand to form a double stranded siRNA.

[1373] E24. The complex of any one of embodiments E13 to E23, wherein the oligonucleotide comprises one or more modified nucleosides, optionally wherein each nucleoside in the oligonucleotide is a modified nucleoside.

[1374] E25. The complex of embodiment E24, wherein the one or more modified nucleosides are 2′ modified nucleotides, optionally wherein the one or more 2′ modified nucleosides are selected from: 2′-fluoro (2′-F), 2′-O-methyl (2′-O-Me), 2′-O-methoxyethyl (2′-MOE), 2′-O-aminopropyl (2′-O-AP), 2′-O-dimethylaminoethyl (2′-O-DMAOE), 2′-O-dimethylaminopropyl (2′-O-DMAP), 2′-O-dimethylaminoethyloxyethyl (2′-O-DMAEOE), 2′-O—N-methylacetamido (2′-O-NMA), locked nucleic acid (LNA), ethylene-bridged nucleic acid (ENA), and (S)-constrained ethyl-bridged nucleic acid (cEt), optionally wherein the 2′ modified nucleotide is 2′-O-methyl or 2′-fluoro (2′-F).

[1375] E26. The complex of any one of embodiments E13 to E25, wherein the oligonucleotide comprises one or more phosphorothioate internucleoside linkages, optionally wherein the one or more phosphorothioate internucleoside linkage are present on the antisense strand of the RNAi oligonucleotide, further optionally wherein the two internucleoside linkages at the 3′ end of the sense strands are phosphorothioate internucleoside linkages.

[1376] E27. The complex of any one of embodiments E13, E14 and E23 to E26, wherein the oligonucleotide is an siRNA listed in Table 28.

[1377] E28. The complex of any one of embodiments E15, E16, and E23 to E26, wherein the oligonucleotide is an siRNA listed in Table 31.

[1378] E29. The complex of any one of embodiments E17, E18, and E23 to E26, wherein the oligonucleotide is an siRNA listed in Table 34.

[1379] E30. The complex of any one of embodiments E19, E20, and E23 to E26, wherein the oligonucleotide is an siRNA listed in Table 37.

[1380] E31. The complex of any one of embodiments E21 to E26, wherein the oligonucleotide is an siRNA listed in Table 40.

[1381] E32. The complex of any one of embodiments E1 to E31, wherein the antibody is covalently linked to the molecular payload via

[1382] (i) a cleavable linker, optionally wherein the cleavable linker comprises a valine-citrulline sequence; or

[1383] (ii) a non-cleavable linker, optionally wherein the non-cleavable linker is an alkane linker.

[1384] E33. A method of reducing MEF2D, KLF15, MED1, MED13, or PPP1R3A expression in a muscle cell, the method comprising contacting the muscle cell with an effective amount of the complex of any one of embodiments E1 to E32 for promoting internalization of the molecular payload to the muscle cell.

[1385] E34. A method of treating a heart disease, the method comprising administering to a subject in need thereof an effective amount of the complex of any one of embodiments E1 to E32, wherein the subject has elevated expression or activity of MEF2D, KLF15, MED1, MED13, or PPP1R3A.

[1386] E35. The method of embodiment E33 or embodiment E34, wherein the complex reduces RNA level of MEF2D, KLF15, MED1, MED13, or PPP1R3A.

[1387] E36. The method of any one of embodiments E33 to E35, wherein the complex reduces protein level of MEF2D, KLF15, MED1, MED13, or PPP1R3A

### QUIVALENTS AND TERMINOLOGY

[1388] The disclosure illustratively described herein suitably can be practiced in the absence of any element or elements, limitation or limitations that are not specifically disclosed herein. Thus, for example, in each instance herein any of the terms “comprising”, “consisting essentially of”, and “consisting of” may be replaced with either of the other two terms. The terms and expressions which have been employed are used as terms of description and not of limitation, and there is no intention that in the use of such terms and expressions of excluding any equivalents of the features shown and described or portions thereof, but it is recognized that various modifications are possible within the scope of the disclosure. Thus, it should be understood that although the present disclosure has been specifically disclosed by preferred embodiments, optional features, modification and variation of the concepts herein disclosed may be resorted to by those skilled in the art, and that such modifications and variations are considered to be within the scope of this disclosure.

[1389] In addition, where features or aspects of the disclosure are described in terms of Markush groups or other grouping of alternatives, those skilled in the art will recognize that the disclosure is also thereby described in terms of any individual member or subgroup of members of the Markush group or other group.

[1390] It should be appreciated that, in some embodiments, sequences presented in the sequence listing may be referred to in describing the structure of an oligonucleotide or other nucleic acid. In such embodiments, the actual oligonucleotide or other nucleic acid may have one or more alternative nucleotides (e.g., an RNA counterpart of a DNA nucleotide or a DNA counterpart of an RNA nucleotide) and/or one or more modified nucleotides and/or one or more modified internucleotide linkages and/or one or more other modification compared with the specified sequence while retaining essentially same or similar complementary properties as the specified sequence.

[1391] The use of the terms “a” and “an” and “the” and similar referents in the context of describing the invention (especially in the context of the following claims) are to be construed to cover both the singular and the plural, unless otherwise indicated herein or clearly contradicted by context. The terms “comprising,” “having,” “including,” and “containing” are to be construed as open-ended terms (i.e., meaning “including, but not limited to,”) unless otherwise noted. Recitation of ranges of values herein are merely intended to serve as a shorthand method of referring individually to each separate value falling within the range, unless otherwise indicated herein, and each separate value is incorporated into the specification as if it were individually recited herein. All methods described herein can be performed in any suitable order unless otherwise indicated herein or otherwise clearly contradicted by context. The use of any and all examples, or exemplary language (e.g., “such as”) provided herein, is intended merely to better illuminate the invention and does not pose a limitation on the scope of the invention unless otherwise claimed. No language in the specification should be construed as indicating any non-claimed element as essential to the practice of the invention.

[1392] Embodiments of this invention are described herein. Variations of those embodiments may become apparent to those of ordinary skill in the art upon reading the foregoing description.

[1393] The inventors expect skilled artisans to employ such variations as appropriate, and the inventors intend for the invention to be practiced otherwise than as specifically described herein. Accordingly, this invention includes all modifications and equivalents of the subject matter recited in the claims appended hereto as permitted by applicable law. Moreover, any combination of the above-described elements in all possible variations thereof is encompassed by the invention unless otherwise indicated herein or otherwise clearly contradicted by context. Those skilled in the art will recognize, or be able to ascertain using no more than routine experimentation, many equivalents to the specific embodiments of the invention described herein. Such equivalents are intended to be encompassed by the following claims.

The application's sequence listing, which the Patent Office published only in electronic form, follows.

SEQUENCE LISTING (1066 sequences)

SEQ ID NO: 1 - protein, 8 aa, synthetic construct
  REGION 1..8: note = Synthetic
GFNIKDDY

SEQ ID NO: 2 - protein, 8 aa, synthetic construct
  REGION 1..8: note = Synthetic
IDPENGDT

SEQ ID NO: 3 - protein, 10 aa, synthetic construct
  REGION 1..10: note = Synthetic
TLWLRRGLDY

SEQ ID NO: 4 - protein, 11 aa, synthetic construct
  REGION 1..11: note = Synthetic
KSLLHSNGYTY

SEQ ID NO: 5 - skipped

SEQ ID NO: 6 - protein, 9 aa, synthetic construct
  REGION 1..9: note = Synthetic
MQHLEYPFT

SEQ ID NO: 7 - protein, 5 aa, synthetic construct
  REGION 1..5: note = Synthetic
DDYMY

SEQ ID NO: 8 - protein, 17 aa, synthetic construct
  REGION 1..17: note = Synthetic
WIDPENGDTEYASKFQD

SEQ ID NO: 9 - protein, 8 aa, synthetic construct
  REGION 1..8: note = Synthetic
WLRRGLDY

SEQ ID NO: 10 - protein, 16 aa, synthetic construct
  REGION 1..16: note = Synthetic
RSSKSLLHSNGYTYLF

SEQ ID NO: 11 - protein, 7 aa, synthetic construct
  REGION 1..7: note = Synthetic
RMSNLAS

SEQ ID NO: 12 - protein, 7 aa, synthetic construct
  REGION 1..7: note = Synthetic
GFNIKDD

SEQ ID NO: 13 - skipped

SEQ ID NO: 14 - protein, 6 aa, synthetic construct
  REGION 1..6: note = Synthetic
LRRGLD

SEQ ID NO: 15 - protein, 12 aa, synthetic construct
  REGION 1..12: note = Synthetic
SKSLLHSNGYTY

SEQ ID NO: 16 - protein, 6 aa, synthetic construct
  REGION 1..6: note = Synthetic
HLEYPF

SEQ ID NO: 17 - protein, 117 aa, synthetic construct
  REGION 1..117: note = Synthetic
EVQLQQSGAELVRPGASVKLSCTASGFNIKDDYMYWVKQRPEQGLEWIGWIDPENGDTEYASKFQDKATVTADTSSNTAYLQLSSLTSEDTAVYYCTLWLRRGLDYWGQGTSVTVSS

SEQ ID NO: 18 - protein, 112 aa, synthetic construct
  REGION 1..112: note = Synthetic
DIVMTQAAPSVPVTPGESVSISCRSSKSLLHSNGYTYLFWFLQRPGQSPQLLIYRMSNLASGVPDRFSGSGSGTAFTLRISRVEAEDVGVYYCMQHLEYPFTFGGGTKLEIK

SEQ ID NO: 19 - protein, 8 aa, synthetic construct
  REGION 1..8: note = Synthetic
IDPETGDT

SEQ ID NO: 20 - protein, 17 aa, synthetic construct
  REGION 1..17: note = Synthetic
WIDPETGDTEYASKFQD

SEQ ID NO: 21 - skipped

SEQ ID NO: 22 - protein, 117 aa, synthetic construct
  REGION 1..117: note = Synthetic
EVQLQQSGAELVRPGASVKLSCTASGFNIKDDYMYWVKQRPEQGLEWIGWIDPETGDTEYASKFQDKATVTADTSSNTAYLQLSSLTSEDTAVYYCTLWLRRGLDYWGQGTSVTVSS

SEQ ID NO: 23 - protein, 8 aa, synthetic construct
  REGION 1..8: note = Synthetic
IDPESGDT

SEQ ID NO: 24 - protein, 17 aa, synthetic construct
  REGION 1..17: note = Synthetic
WIDPESGDTEYASKFQD

SEQ ID NO: 25 - skipped

SEQ ID NO: 26 - protein, 117 aa, synthetic construct
  REGION 1..117: note = Synthetic
EVQLQQSGAELVRPGASVKLSCTASGFNIKDDYMYWVKQRPEQGLEWIGWIDPESGDTEYASKFQDKATVTADTSSNTAYLQLSSLTSEDTAVYYCTLWLRRGLDYWGQGTSVTVSS

SEQ ID NO: 27 - protein, 9 aa, synthetic construct
  REGION 1..9: note = Synthetic
GYSITSGYY

SEQ ID NO: 28 - protein, 7 aa, synthetic construct
  REGION 1..7: note = Synthetic
ITFDGAN

SEQ ID NO: 29 - protein, 12 aa, synthetic construct
  REGION 1..12: note = Synthetic
TRSSYDYDVLDY

SEQ ID NO: 30 - protein, 6 aa, synthetic construct
  REGION 1..6: note = Synthetic
QDISNF

SEQ ID NO: 31 - skipped

SEQ ID NO: 32 - protein, 9 aa, synthetic construct
  REGION 1..9: note = Synthetic
QQGHTLPYT

SEQ ID NO: 33 - protein, 6 aa, synthetic construct
  REGION 1..6: note = Synthetic
SGYYWN

SEQ ID NO: 34 - protein, 16 aa, synthetic construct
  REGION 1..16: note = Synthetic
YITFDGANNYNPSLKN

SEQ ID NO: 35 - protein, 10 aa, synthetic construct
  REGION 1..10: note = Synthetic
SSYDYDVLDY

SEQ ID NO: 36 - protein, 11 aa, synthetic construct
  REGION 1..11: note = Synthetic
RASQDISNFLN

SEQ ID NO: 37 - protein, 7 aa, synthetic construct
  REGION 1..7: note = Synthetic
YTSRLHS

SEQ ID NO: 38 - protein, 8 aa, synthetic construct
  REGION 1..8: note = Synthetic
GYSITSGY

SEQ ID NO: 39 - skipped

SEQ ID NO: 40 - protein, 8 aa, synthetic construct
  REGION 1..8: note = Synthetic
SYDYDVLD

SEQ ID NO: 41 - protein, 7 aa, synthetic construct
  REGION 1..7: note = Synthetic
SQDISNF

SEQ ID NO: 42 - protein, 6 aa, synthetic construct
  REGION 1..6: note = Synthetic
GHTLPY

SEQ ID NO: 43 - protein, 119 aa, synthetic construct
  REGION 1..119: note = Synthetic
DVQLQESGPGLVKPSQSLSLTCSVTGYSITSGYYWNWIRQFPGNKLEWMGYITFDGANNYNPSLKNRISITRDTSKNQFFLKLTSVTTEDTATYYCTRSSYDYDVLDYWGQGTTLTVSS

SEQ ID NO: 44 - protein, 107 aa, synthetic construct
  REGION 1..107: note = Synthetic
DIQMTQTTSSLSASLGDRVTISCRASQDISNFLNWYQQRPDGTVKLLIYYTSRLHSGVPSRFSGSGSGTDFSLTVSNLEQEDIATYFCQQGHTLPYTFGGGTKLEIK

SEQ ID NO: 45 - protein, 8 aa, synthetic construct
  REGION 1..8: note = Synthetic
GYSFTDYC

SEQ ID NO: 46 - protein, 8 aa, synthetic construct
  REGION 1..8: note = Synthetic
IYPGSGNT

SEQ ID NO: 47 - protein, 13 aa, synthetic construct
  REGION 1..13: note = Synthetic
AREDYYPYHGMDY

SEQ ID NO: 48 - protein, 10 aa, synthetic construct
  REGION 1..10: note = Synthetic
ESVDGYDNSF

SEQ ID NO: 49 - skipped

SEQ ID NO: 50 - protein, 9 aa, synthetic construct
  REGION 1..9: note = Synthetic
QQSSEDPWT

SEQ ID NO: 51 - protein, 5 aa, synthetic construct
  REGION 1..5: note = Synthetic
DYCIN

SEQ ID NO: 52 - protein, 17 aa, synthetic construct
  REGION 1..17: note = Synthetic
WIYPGSGNTRYSERFKG

SEQ ID NO: 53 - protein, 11 aa, synthetic construct
  REGION 1..11: note = Synthetic
EDYYPYHGMDY

SEQ ID NO: 54 - protein, 15 aa, synthetic construct
  REGION 1..15: note = Synthetic
RASESVDGYDNSFMH

SEQ ID NO: 55 - protein, 7 aa, synthetic construct
  REGION 1..7: note = Synthetic
RASNLES

SEQ ID NO: 56 - protein, 7 aa, synthetic construct
  REGION 1..7: note = Synthetic
GYSFTDY

SEQ ID NO: 57 - skipped

SEQ ID NO: 58 - protein, 9 aa, synthetic construct
  REGION 1..9: note = Synthetic
DYYPYHGMD

SEQ ID NO: 59 - protein, 11 aa, synthetic construct
  REGION 1..11: note = Synthetic
SESVDGYDNSF

SEQ ID NO: 60 - protein, 6 aa, synthetic construct
  REGION 1..6: note = Synthetic
SSEDPW

SEQ ID NO: 61 - protein, 120 aa, synthetic construct
  REGION 1..120: note = Synthetic
QIQLQQSGPELVRPGASVKISCKASGYSFTDYCINWVNQRPGQGLEWIGWIYPGSGNTRYSERFKGKATLTVDTSSNTAYMQLSSLTSEDSAVYFCAREDYYPYHGMDYWGQGTSVTVSS

SEQ ID NO: 62 - protein, 111 aa, synthetic construct
  REGION 1..111: note = Synthetic
DIVLTQSPTSLAVSLGQRATISCRASESVDGYDNSFMHWYQQKPGQPPKLLIFRASNLESGIPARFSGSGSRTDFTLTINPVEAADVATYYCQQSSEDPWTFGGGTKLEIK

SEQ ID NO: 63 - protein, 8 aa, synthetic construct
  REGION 1..8: note = Synthetic
GYSFTDYY

SEQ ID NO: 64 - protein, 5 aa, synthetic construct
  REGION 1..5: note = Synthetic
DYYIN

SEQ ID NO: 65 - protein, 120 aa, synthetic construct
  REGION 1..120: note = Synthetic
QIQLQQSGPELVRPGASVKISCKASGYSFTDYYINWVNQRPGQGLEWIGWIYPGSGNTRYSERFKGKATLTVDTSSNTAYMQLSSLTSEDSAVYFCAREDYYPYHGMDYWGQGTSVTVSS

SEQ ID NO: 66 - protein, 8 aa, synthetic construct
  REGION 1..8: note = Synthetic
GYSFTDYD

SEQ ID NO: 67 - protein, 5 aa, synthetic construct
  REGION 1..5: note = Synthetic
DYDIN

SEQ ID NO: 68 - protein, 120 aa, synthetic construct
  REGION 1..120: note = Synthetic
QIQLQQSGPELVRPGASVKISCKASGYSFTDYDINWVNQRPGQGLEWIGWIYPGSGNTRYSERFKGKATLTVDTSSNTAYMQLSSLTSEDSAVYFCAREDYYPYHGMDYWGQGTSVTVSS

SEQ ID NO: 69 - protein, 117 aa, synthetic construct
  REGION 1..117: note = Synthetic
EVQLVQSGSELKKPGASVKVSCTASGFNIKDDYMYWVRQPPGKGLEWIGWIDPETGDTEYASKFQDRVTVTADTSTNTAYMELSSLRSEDTAVYYCTLWLRRGLDYWGQGTLVTVSS

SEQ ID NO: 70 - protein, 112 aa, synthetic construct
  REGION 1..112: note = Synthetic
DIVMTQSPLSLPVTPGEPASISCRSSKSLLHSNGYTYLFWFQQRPGQSPRLLIYRMSNLASGVPDRFSGSGSGTDFTLKISRVEAEDVGVYYCMQHLEYPFTFGGGTKVEIK

SEQ ID NO: 71 - protein, 117 aa, synthetic construct
  REGION 1..117: note = Synthetic
EVQLVQSGSELKKPGASVKVSCTASGFNIKDDYMYWVRQPPGKGLEWIGWIDPESGDTEYASKFQDRVTVTADTSTNTAYMELSSLRSEDTAVYYCTLWLRRGLDYWGQGTLVTVSS

SEQ ID NO: 72 - protein, 117 aa, synthetic construct
  REGION 1..117: note = Synthetic
EVQLVQSGSELKKPGASVKVSCTASGFNIKDDYMYWVRQPPGKGLEWIGWIDPENGDTEYASKFQDRVTVTADTSTNTAYMELSSLRSEDTAVYYCTLWLRRGLDYWGQGTLVTVSS

SEQ ID NO: 73 - protein, 119 aa, synthetic construct
  REGION 1..119: note = Synthetic
QVQLQESGPGLVKPSQTLSLTCSVTGYSITSGYYWNWIRQPPGKGLEWMGYITFDGANNYNPSLKNRVSISRDTSKNQFSLKLSSVTAEDTATYYCTRSSYDYDVLDYWGQGTTVTVSS

SEQ ID NO: 74 - protein, 107 aa, synthetic construct
  REGION 1..107: note = Synthetic
DIQMTQSPSSLSASVGDRVTITCRASQDISNFLNWYQQKPGQPVKLLIYYTSRLHSGVPSRFSGSGSGTDFTLTISSLQPEDFATYFCQQGHTLPYTFGQGTKLEIK

SEQ ID NO: 75 - protein, 107 aa, synthetic construct
  REGION 1..107: note = Synthetic
DIQMTQSPSSLSASVGDRVTITCRASQDISNFLNWYQQKPGQPVKLLIYYTSRLHSGVPSRFSGSGSGTDFTLTISSLQPEDFATYYCQQGHTLPYTFGQGTKLEIK

SEQ ID NO: 76 - protein, 119 aa, synthetic construct
  REGION 1..119: note = Synthetic
QVQLQESGPGLVKPSQTLSLTCTVTGYSITSGYYWNWIRQPPGKGLEWIGYITFDGANNYNPSLKNRVSISRDTSKNQFSLKLSSVTAEDTATYYCTRSSYDYDVLDYWGQGTTVTVSS

SEQ ID NO: 77 - protein, 120 aa, synthetic construct
  REGION 1..120: note = Synthetic
QVQLVQSGAEVKKPGASVKVSCKASGYSFTDYYINWVRQAPGQGLEWMGWIYPGSGNTRYSERFKGRVTITRDTSASTAYMELSSLRSEDTAVYYCAREDYYPYHGMDYWGQGTLVTVSS

SEQ ID NO: 78 - protein, 111 aa, synthetic construct
  REGION 1..111: note = Synthetic
DIVLTQSPDSLAVSLGERATINCRASESVDGYDNSFMHWYQQKPGQPPKLLIFRASNLESGVPDRFSGSGSRTDFTLTISSLQAEDVAVYYCQQSSEDPWTFGQGTKLEIK

SEQ ID NO: 79 - protein, 120 aa, synthetic construct
  REGION 1..120: note = Synthetic
QVQLVQSGAEVKKPGASVKVSCKASGYSFTDYDINWVRQAPGQGLEWMGWIYPGSGNTRYSERFKGRVTITRDTSASTAYMELSSLRSEDTAVYYCAREDYYPYHGMDYWGQGTLVTVSS

SEQ ID NO: 80 - protein, 111 aa, synthetic construct
  REGION 1..111: note = Synthetic
DIVMTQSPDSLAVSLGERATINCRASESVDGYDNSFMHWYQQKPGQPPKLLIFRASNLESGVPDRFSGSGSGTDFTLTISSLQAEDVAVYYCQQSSEDPWTFGQGTKLEIK

SEQ ID NO: 81 - protein, 330 aa, synthetic construct [sequence omitted]

SEQ ID NO: 82 - protein, 330 aa, synthetic construct
  REGION 1..330: note = Synthetic
ASTKGPSVFPLAPSSKSTSGGTAALGCLVKDYFPEPVTVSWNSGALTSGVHTFPAVLQSSGLYSLSSVVTVPSSSLGTQTYICNVNHKPSNTKVDKKVEPKSCDKTHTCPPCPAPEAAGGPSVFLFPPKPKDTLMISRTPEVTCVVVDVSHEDPEVKFNWYVDGVEVHNAKTKPREEQYNSTYRVVSVLTVLHQDWLNGKEYKCKVSNKALPAPIEKTISKAKGQPREPQVYTLPPSRDELTKNQVSLTCLVKGFYPSDIAVEWESNGQPENNYKTTPPVLDSDGSFFLYSKLTVDKSRWQQGNVFSCSVMHEALHNHYTQKSLSLSPGK

SEQ ID NO: 83 - protein, 107 aa, synthetic construct [sequence omitted]

SEQ ID NO: 84 - protein, 447 aa, synthetic construct
  REGION 1..447: note = Synthetic
EVQLVQSGSELKKPGASVKVSCTASGFNIKDDYMYWVRQPPGKGLEWIGWIDPETGDTEYASKFQDRVTVTADTSTNTAYMELSSLRSEDTAVYYCTLWLRRGLDYWGQGTLVTVSSASTKGPSVFPLAPSSKSTSGGTAALGCLVKDYFPEPVTVSWNSGALTSGVHTFPAVLQSSGLYSLSSVVTVPSSSLGTQTYICNVNHKPSNTKVDKKVEPKSCDKTHTCPPCPAPELLGGPSVFLFPPKPKDTLMISRTPEVTCVVVDVSHEDPEVKFNWYVDGVEVHNAKTKPREEQYNSTYRVVSVLTVLHQDWLNGKEYKCKVSNKALPAPIEKTISKAKGQPREPQVYTLPPSRDELTKNQVSLTCLVKGFYPSDIAVEWESNGQPENNYKTTPPVLDSDGSFFLYSKLTVDKSRWQQGNVFSCSVMHEALHNHYTQKSLSLSPGK

SEQ ID NO: 85 - protein, 219 aa, synthetic construct
  REGION 1..219: note = Synthetic
DIVMTQSPLSLPVTPGEPASISCRSSKSLLHSNGYTYLFWFQQRPGQSPRLLIYRMSNLASGVPDRFSGSGSGTDFTLKISRVEAEDVGVYYCMQHLEYPFTFGGGTKVEIKRTVAAPSVFIFPPSDEQLKSGTASVVCLLNNFYPREAKVQWKVDNALQSGNSQESVTEQDSKDSTYSLSSTLTLSKADYEKHKVYACEVTHQGLSSPVTKSFNRGEC

SEQ ID NO: 86 - protein, 447 aa, synthetic construct
  REGION 1..447: note = Synthetic
EVQLVQSGSELKKPGASVKVSCTASGFNIKDDYMYWVRQPPGKGLEWIGWIDPESGDTEYASKFQDRVTVTADTSTNTAYMELSSLRSEDTAVYYCTLWLRRGLDYWGQGTLVTVSSASTKGPSVFPLAPSSKSTSGGTAALGCLVKDYFPEPVTVSWNSGALTSGVHTFPAVLQSSGLYSLSSVVTVPSSSLGTQTYICNVNHKPSNTKVDKKVEPKSCDKTHTCPPCPAPELLGGPSVFLFPPKPKDTLMISRTPEVTCVVVDVSHEDPEVKFNWYVDGVEVHNAKTKPREEQYNSTYRVVSVLTVLHQDWLNGKEYKCKVSNKALPAPIEKTISKAKGQPREPQVYTLPPSRDELTKNQVSLTCLVKGFYPSDIAVEWESNGQPENNYKTTPPVLDSDGSFFLYSKLTVDKSRWQQGNVFSCSVMHEALHNHYTQKSLSLSPGK

SEQ ID NO: 87 - protein, 447 aa, synthetic construct
  REGION 1..447: note = Synthetic
EVQLVQSGSELKKPGASVKVSCTASGFNIKDDYMYWVRQPPGKGLEWIGWIDPENGDTEYASKFQDRVTVTADTSTNTAYMELSSLRSEDTAVYYCTLWLRRGLDYWGQGTLVTVSSASTKGPSVFPLAPSSKSTSGGTAALGCLVKDYFPEPVTVSWNSGALTSGVHTFPAVLQSSGLYSLSSVVTVPSSSLGTQTYICNVNHKPSNTKVDKKVEPKSCDKTHTCPPCPAPELLGGPSVFLFPPKPKDTLMISRTPEVTCVVVDVSHEDPEVKFNWYVDGVEVHNAKTKPREEQYNSTYRVVSVLTVLHQDWLNGKEYKCKVSNKALPAPIEKTISKAKGQPREPQVYTLPPSRDELTKNQVSLTCLVKGFYPSDIAVEWESNGQPENNYKTTPPVLDSDGSFFLYSKLTVDKSRWQQGNVFSCSVMHEALHNHYTQKSLSLSPGK

SEQ ID NO: 88 - protein, 449 aa, synthetic construct
  REGION 1..449: note = Synthetic
QVQLQESGPGLVKPSQTLSLTCSVTGYSITSGYYWNWIRQPPGKGLEWMGYITFDGANNYNPSLKNRVSISRDTSKNQFSLKLSSVTAEDTATYYCTRSSYDYDVLDYWGQGTTVTVSSASTKGPSVFPLAPSSKSTSGGTAALGCLVKDYFPEPVTVSWNSGALTSGVHTFPAVLQSSGLYSLSSVVTVPSSSLGTQTYICNVNHKPSNTKVDKKVEPKSCDKTHTCPPCPAPELLGGPSVFLFPPKPKDTLMISRTPEVTCVVVDVSHEDPEVKFNWYVDGVEVHNAKTKPREEQYNSTYRVVSVLTVLHQDWLNGKEYKCKVSNKALPAPIEKTISKAKGQPREPQVYTLPPSRDELTKNQVSLTCLVKGFYPSDIAVEWESNGQPENNYKTTPPVLDSDGSFFLYSKLTVDKSRWQQGNVFSCSVMHEALHNHYTQKSLSLSPGK

SEQ ID NO: 89 - protein, 214 aa, synthetic construct
  REGION 1..214: note = Synthetic
DIQMTQSPSSLSASVGDRVTITCRASQDISNFLNWYQQKPGQPVKLLIYYTSRLHSGVPSRFSGSGSGTDFTLTISSLQPEDFATYFCQQGHTLPYTFGQGTKLEIKRTVAAPSVFIFPPSDEQLKSGTASVVCLLNNFYPREAKVQWKVDNALQSGNSQESVTEQDSKDSTYSLSSTLTLSKADYEKHKVYACEVTHQGLSSPVTKSFNRGEC

SEQ ID NO: 90 - protein, 214 aa, synthetic construct
  REGION 1..214: note = Synthetic
DIQMTQSPSSLSASVGDRVTITCRASQDISNFLNWYQQKPGQPVKLLIYYTSRLHSGVPSRFSGSGSGTDFTLTISSLQPEDFATYYCQQGHTLPYTFGQGTKLEIKRTVAAPSVFIFPPSDEQLKSGTASVVCLLNNFYPREAKVQWKVDNALQSGNSQESVTEQDSKDSTYSLSSTLTLSKADYEKHKVYACEVTHQGLSSPVTKSFNRGEC

SEQ ID NO: 91 - protein, 449 aa, synthetic construct
  REGION 1..449: note = Synthetic
QVQLQESGPGLVKPSQTLSLTCTVTGYSITSGYYWNWIRQPPGKGLEWIGYITFDGANNYNPSLKNRVSISRDTSKNQFSLKLSSVTAEDTATYYCTRSSYDYDVLDYWGQGTTVTVSSASTKGPSVFPLAPSSKSTSGGTAALGCLVKDYFPEPVTVSWNSGALTSGVHTFPAVLQSSGLYSLSSVVTVPSSSLGTQTYICNVNHKPSNTKVDKKVEPKSCDKTHTCPPCPAPELLGGPSVFLFPPKPKDTLMISRTPEVTCVVVDVSHEDPEVKFNWYVDGVEVHNAKTKPREEQYNSTYRVVSVLTVLHQDWLNGKEYKCKVSNKALPAPIEKTISKAKGQPREPQVYTLPPSRDELTKNQVSLTCLVKGFYPSDIAVEWESNGQPENNYKTTPPVLDSDGSFFLYSKLTVDKSRWQQGNVFSCSVMHEALHNHYTQKSLSLSPGK

SEQ ID NO: 92 - protein, 450 aa, synthetic construct
  REGION 1..450: note = Synthetic
QVQLVQSGAEVKKPGASVKVSCKASGYSFTDYYINWVRQAPGQGLEWMGWIYPGSGNTRYSERFKGRVTITRDTSASTAYMELSSLRSEDTAVYYCAREDYYPYHGMDYWGQGTLVTVSSASTKGPSVFPLAPSSKSTSGGTAALGCLVKDYFPEPVTVSWNSGALTSGVHTFPAVLQSSGLYSLSSVVTVPSSSLGTQTYICNVNHKPSNTKVDKKVEPKSCDKTHTCPPCPAPELLGGPSVFLFPPKPKDTLMISRTPEVTCVVVDVSHEDPEVKFNWYVDGVEVHNAKTKPREEQYNSTYRVVSVLTVLHQDWLNGKEYKCKVSNKALPAPIEKTISKAKGQPREPQVYTLPPSRDELTKNQVSLTCLVKGFYPSDIAVEWESNGQPENNYKTTPPVLDSDGSFFLYSKLTVDKSRWQQGNVFSCSVMHEALHNHYTQKSLSLSPGK

SEQ ID NO: 93 - protein, 218 aa, synthetic construct
  REGION 1..218: note = Synthetic
DIVLTQSPDSLAVSLGERATINCRASESVDGYDNSFMHWYQQKPGQPPKLLIFRASNLESGVPDRFSGSGSRTDFTLTISSLQAEDVAVYYCQQSSEDPWTFGQGTKLEIKRTVAAPSVFIFPPSDEQLKSGTASVVCLLNNFYPREAKVQWKVDNALQSGNSQESVTEQDSKDSTYSLSSTLTLSKADYEKHKVYACEVTHQGLSSPVTKSFNRGEC

SEQ ID NO: 94 - protein, 450 aa, synthetic construct
  REGION 1..450: note = Synthetic
QVQLVQSGAEVKKPGASVKVSCKASGYSFTDYDINWVRQAPGQGLEWMGWIYPGSGNTRYSERFKGRVTITRDTSASTAYMELSSLRSEDTAVYYCAREDYYPYHGMDYWGQGTLVTVSSASTKGPSVFPLAPSSKSTSGGTAALGCLVKDYFPEPVTVSWNSGALTSGVHTFPAVLQSSGLYSLSSVVTVPSSSLGTQTYICNVNHKPSNTKVDKKVEPKSCDKTHTCPPCPAPELLGGPSVFLFPPKPKDTLMISRTPEVTCVVVDVSHEDPEVKFNWYVDGVEVHNAKTKPREEQYNSTYRVVSVLTVLHQDWLNGKEYKCKVSNKALPAPIEKTISKAKGQPREPQVYTLPPSRDELTKNQVSLTCLVKGFYPSDIAVEWESNGQPENNYKTTPPVLDSDGSFFLYSKLTVDKSRWQQGNVFSCSVMHEALHNHYTQKSLSLSPGK

SEQ ID NO: 95 - protein, 218 aa, synthetic construct
  REGION 1..218: note = Synthetic
DIVMTQSPDSLAVSLGERATINCRASESVDGYDNSFMHWYQQKPGQPPKLLIFRASNLESGVPDRFSGSGSGTDFTLTISSLQAEDVAVYYCQQSSEDPWTFGQGTKLEIKRTVAAPSVFIFPPSDEQLKSGTASVVCLLNNFYPREAKVQWKVDNALQSGNSQESVTEQDSKDSTYSLSSTLTLSKADYEKHKVYACEVTHQGLSSPVTKSFNRGEC

SEQ ID NO: 96 - protein, 108 aa, synthetic construct
  REGION 1..108: note = Synthetic
ASTKGPSVFPLAPSSKSTSGGTAALGCLVKDYFPEPVTVSWNSGALTSGVHTFPAVLQSSGLYSLSSVVTVPSSSLGTQTYICNVNHKPSNTKVDKKVEPKSCDKTHT

SEQ ID NO: 97 - protein, 225 aa, synthetic construct
  REGION 1..225: note = Synthetic
EVQLVQSGSELKKPGASVKVSCTASGFNIKDDYMYWVRQPPGKGLEWIGWIDPETGDTEYASKFQDRVTVTADTSTNTAYMELSSLRSEDTAVYYCTLWLRRGLDYWGQGTLVTVSSASTKGPSVFPLAPSSKSTSGGTAALGCLVKDYFPEPVTVSWNSGALTSGVHTFPAVLQSSGLYSLSSVVTVPSSSLGTQTYICNVNHKPSNTKVDKKVEPKSCDKTHT

SEQ ID NO: 98 - protein, 225 aa, synthetic construct
  REGION 1..225: note = Synthetic
EVQLVQSGSELKKPGASVKVSCTASGFNIKDDYMYWVRQPPGKGLEWIGWIDPESGDTEYASKFQDRVTVTADTSTNTAYMELSSLRSEDTAVYYCTLWLRRGLDYWGQGTLVTVSSASTKGPSVFPLAPSSKSTSGGTAALGCLVKDYFPEPVTVSWNSGALTSGVHTFPAVLQSSGLYSLSSVVTVPSSSLGTQTYICNVNHKPSNTKVDKKVEPKSCDKTHT

SEQ ID NO: 99 - protein, 225 aa, synthetic construct
  REGION 1..225: note = Synthetic
EVQLVQSGSELKKPGASVKVSCTASGFNIKDDYMYWVRQPPGKGLEWIGWIDPENGDTEYASKFQDRVTVTADTSTNTAYMELSSLRSEDTAVYYCTLWLRRGLDYWGQGTLVTVSSASTKGPSVFPLAPSSKSTSGGTAALGCLVKDYFPEPVTVSWNSGALTSGVHTFPAVLQSSGLYSLSSVVTVPSSSLGTQTYICNVNHKPSNTKVDKKVEPKSCDKTHT

SEQ ID NO: 100 - protein, 227 aa, synthetic construct
  REGION 1..227: note = Synthetic
QVQLQESGPGLVKPSQTLSLTCSVTGYSITSGYYWNWIRQPPGKGLEWMGYITFDGANNYNPSLKNRVSISRDTSKNQFSLKLSSVTAEDTATYYCTRSSYDYDVLDYWGQGTTVTVSSASTKGPSVFPLAPSSKSTSGGTAALGCLVKDYFPEPVTVSWNSGALTSGVHTFPAVLQSSGLYSLSSVVTVPSSSLGTQTYICNVNHKPSNTKVDKKVEPKSCDKTHT

SEQ ID NO: 101 - protein, 227 aa, synthetic construct
  REGION 1..227: note = Synthetic
QVQLQESGPGLVKPSQTLSLTCTVTGYSITSGYYWNWIRQPPGKGLEWIGYITFDGANNYNPSLKNRVSISRDTSKNQFSLKLSSVTAEDTATYYCTRSSYDYDVLDYWGQGTTVTVSSASTKGPSVFPLAPSSKSTSGGTAALGCLVKDYFPEPVTVSWNSGALTSGVHTFPAVLQSSGLYSLSSVVTVPSSSLGTQTYICNVNHKPSNTKVDKKVEPKSCDKTHT

SEQ ID NO: 102 - protein, 228 aa, synthetic construct
  REGION 1..228: note = Synthetic
QVQLVQSGAEVKKPGASVKVSCKASGYSFTDYYINWVRQAPGQGLEWMGWIYPGSGNTRYSERFKGRVTITRDTSASTAYMELSSLRSEDTAVYYCAREDYYPYHGMDYWGQGTLVTVSSASTKGPSVFPLAPSSKSTSGGTAALGCLVKDYFPEPVTVSWNSGALTSGVHTFPAVLQSSGLYSLSSVVTVPSSSLGTQTYICNVNHKPSNTKVDKKVEPKSCDKTHT

SEQ ID NO: 103 - protein, 228 aa, synthetic construct
  REGION 1..228: note = Synthetic
QVQLVQSGAEVKKPGASVKVSCKASGYSFTDYDINWVRQAPGQGLEWMGWIYPGSGNTRYSERFKGRVTITRDTSASTAYMELSSLRSEDTAVYYCAREDYYPYHGMDYWGQGTLVTVSSASTKGPSVFPLAPSSKSTSGGTAALGCLVKDYFPEPVTVSWNSGALTSGVHTFPAVLQSSGLYSLSSVVTVPSSSLGTQTYICNVNHKPSNTKVDKKVEPKSCDKTHT

SEQ ID NO: 104 - protein, 19 aa, synthetic construct
  REGION 1..19: note = Synthetic
MGWSCIILFLVATATGVHS

SEQ ID NO: 105 - protein, 760 aa, synthetic construct
  REGION 1..760: note = Synthetic
MMDQARSAFSNLFGGEPLSYTRFSLARQVDGDNSHVEMKLAVDEEENADNNTKANVTKPKRCSGSICYGTIAVIVFFLIGFMIGYLGYCKGVEPKTECERLAGTESPVREEPGEDFPAARRLYWDDLKRKLSEKLDSTDFTGTIKLLNENSYVPREAGSQKDENLALYVENQFREFKLSKVWRDQHFVKIQVKDSAQNSVIIVDKNGRLVYLVENPGGYVAYSKAATVTGKLVHANFGTKKDFEDLYTPVNGSIVIVRAGKITFAEKVANAESLNAIGVLIYMDQTKFPIVNAELSFFGHAHLGTGDPYTPGFPSFNHTQFPPSRSSGLPNIPVQTISRAAAEKLFGNMEGDCPSDWKTDSTCRMVTSESKNVKLTVSNVLKEIKILNIFGVIKGFVEPDHYVVVGAQRDAWGPGAAKSGVGTALLLKLAQMFSDMVLKDGFQPSRSIIFASWSAGDFGSVGATEWLEGYLSSLHLKAFTYINLDKAVLGTSNFKVSASPLLYTLIEKTMQNVKHPVTGQFLYQDSNWASKVEKLTLDNAAFPFLAYSGIPAVSFCFCEDTDYPYLGTTMDTYKELIERIPELNKVARAAAEVAGQFVIKLTHDVELNLDYERYNSQLLSFVRDLNQYRADIKEMGLSLQWLYSARGDFFRATSRLTTDFGNAEKTDRFVMKKLNDRVMRVEYHFLSPYVSPKESPFRHVFWGSGSHTLPALLENLKLRKQNNGAFNETLFRNQLALATWTIQGAANALSGDVWDIDNEF

SEQ ID NO: 106 - protein, 760 aa, synthetic construct
  REGION 1..760: note = Synthetic
MMDQARSAFSNLFGGEPLSYTRFSLARQVDGDNSHVEMKLGVDEEENTDNNTKPNGTKPKRCGGNICYGTIAVIIFFLIGFMIGYLGYCKGVEPKTECERLAGTESPAREEPEEDFPAAPRLYWDDLKRKLSEKLDTTDFTSTIKLLNENLYVPREAGSQKDENLALYIENQFREFKLSKVWRDQHFVKIQVKDSAQNSVIIVDKNGGLVYLVENPGGYVAYSKAATVTGKLVHANFGTKKDFEDLDSPVNGSIVIVRAGKITFAEKVANAESLNAIGVLIYMDQTKFPIVKADLSFFGHAHLGTGDPYTPGFPSFNHTQFPPSQSSGLPNIPVQTISRAAAEKLFGNMEGDCPSDWKTDSTCKMVTSENKSVKLTVSNVLKETKILNIFGVIKGFVEPDHYVVVGAQRDAWGPGAAKSSVGTALLLKLAQMFSDMVLKDGFQPSRSIIFASWSAGDFGSVGATEWLEGYLSSLHLKAFTYINLDKAVLGTSNFKVSASPLLYTLIEKTMQDVKHPVTGRSLYQDSNWASKVEKLTLDNAAFPFLAYSGIPAVSFCFCEDTDYPYLGTTMDTYKELVERIPELNKVARAAAEVAGQFVIKLTHDTELNLDYERYNSQLLLFLRDLNQYRADVKEMGLSLQWLYSARGDFFRATSRLTTDFRNAEKRDKFVMKKLNDRVMRVEYYFLSPYVSPKESPFRHVFWGSGSHTLSALLESLKLRRQNNSAFNETLFRNQLALATWTIQGAANALSGDVWDIDNEF

SEQ ID NO: 107 - protein, 760 aa, synthetic construct
  REGION 1..760: note = Synthetic
MMDQARSAFSNLFGGEPLSYTRFSLARQVDGDNSHVEMKLGVDEEENTDNNTKANGTKPKRCGGNICYGTIAVIIFFLIGFMIGYLGYCKGVEPKTECERLAGTESPAREEPEEDFPAAPRLYWDDLKRKLSEKLDTTDFTSTIKLLNENLYVPREAGSQKDENLALYIENQFREFKLSKVWRDQHFVKIQVKDSAQNSVIIVDKNGGLVYLVENPGGYVAYSKAATVTGKLVHANFGTKKDFEDLDSPVNGSIVIVRAGKITFAEKVANAESLNAIGVLIYMDQTKFPIVKADLSFFGHAHLGTGDPYTPGFPSFNHTQFPPSQSSGLPNIPVQTISRAAAEKLFGNMEGDCPSDWKTDSTCKMVTSENKSVKLTVSNVLKETKILNIFGVIKGFVEPDHYVVVGAQRDAWGPGAAKSSVGTALLLKLAQMFSDMVLKDGFQPSRSIIFASWSAGDFGSVGATEWLEGYLSSLHLKAFTYINLDKAVLGTSNFKVSASPLLYTLIEKTMQDVKHPVTGRSLYQDSNWASKVEKLTLDNAAFPFLAYSGIPAVSFCFCEDTDYPYLGTTMDTYKELVERIPELNKVARAAAEVAGQFVIKLTHDTELNLDYERYNSQLLLFLRDLNQYRADVKEMGLSLQWLYSARGDFFRATSRLTTDFRNAEKRDKFVMKKLNDRVMRVEYYFLSPYVSPKESPFRHVFWGSGSHTLSALLESLKLRRQNNSAFNETLFRNQLALATWTIQGAANALSGDVWDIDNEF

SEQ ID NO: 108 - protein, 763 aa, synthetic construct
  REGION 1..763: note = Synthetic
MMDQARSAFSNLFGGEPLSYTRFSLARQVDGDNSHVEMKLAADEEENADNNMKASVRKPKRFNGRLCFAAIALVIFFLIGFMSGYLGYCKRVEQKEECVKLAETEETDKSETMETEDVPTSSRLYWADLKTLLSEKLNSIEFADTIKQLSQNTYTPREAGSQKDESLAYYIENQFHEFKFSKVWRDEHYVKIQVKSSIGQNMVTIVQSNGNLDPVESPEGYVAFSKPTEVSGKLVHANFGTKKDFEELSYSVNGSLVIVRAGEITFAEKVANAQSFNAIGVLIYMDKNKFPVVEADLALFGHAHLGTGDPYTPGFPSFNHTQFPPSQSSGLPNIPVQTISRAAAEKLFGKMEGSCPARWNIDSSCKLELSQNQNVKLIVKNVLKERRILNIFGVIKGYEEPDRYVVVGAQRDALGAGVAAKSSVGTGLLLKLAQVFSDMISKDGFRPSRSIIFASWTAGDFGAVGATEWLEGYLSSLHLKAFTYINLDKVVLGTSNFKVSASPLLYTLMGKIMQDVKHPVDGKSLYRDSNWISKVEKLSFDNAAYPFLAYSGIPAVSFCFCEDADYPYLGTRLDTYEALTQKVPQLNQMVRTAAEVAGQLIIKLTHDVELNLDYEMYNSKLLSFMKDLNQFKTDIRDMGLSLQWLYSARGDYFRATSRLTTDFHNAEKTNRFVMREINDRIMKVEYHFLSPYVSPRESPFRHIFWGSGSHTLSALVENLKLRQKNITAFNETLFRNQLALATWTIQGVANALSGDIWNIDNEF

SEQ ID NO: 109 - protein, 197 aa, synthetic construct
  REGION 1..197: note = Synthetic
FVKIQVKDSAQNSVIIVDKNGRLVYLVENPGGYVAYSKAATVTGKLVHANFGTKKDFEDLYTPVNGSIVIVRAGKITFAEKVANAESLNAIGVLIYMDQTKFPIVNAELSFFGHAHLGTGDPYTPGFPSFNHTQFPPSRSSGLPNIPVQTISRAAAEKLFGNMEGDCPSDWKTDSTCRMVTSESKNVKLTVSNVLKE

SEQ ID NO: 110 - protein, 5 aa, synthetic construct
  REGION 1..5: note = Synthetic
SYWMH

SEQ ID NO: 111 - protein, 17 aa, synthetic construct
  REGION 1..17: note = Synthetic
EINPTNGRTNYIEKFKS

SEQ ID NO: 112 - protein, 7 aa, synthetic construct
  REGION 1..7: note = Synthetic
GTRAYHY

SEQ ID NO: 113 - protein, 11 aa, synthetic construct
  REGION 1..11: note = Synthetic
RASDNLYSNLA

SEQ ID NO: 114 - protein, 7 aa, synthetic construct
  REGION 1..7: note = Synthetic
DATNLAD

SEQ ID NO: 115 - protein, 9 aa, synthetic construct
  REGION 1..9: note = Synthetic
QHFWGTPLT

SEQ ID NO: 116 - protein, 7 aa, synthetic construct
  REGION 1..7: note = Synthetic
GYTFTSY

SEQ ID NO: 117 - protein, 6 aa, synthetic construct
  REGION 1..6: note = Synthetic
NPTNGR

SEQ ID NO: 118 - protein, 6 aa, synthetic construct
  REGION 1..6: note = Synthetic
TSYWMH

SEQ ID NO: 119 - protein, 13 aa, synthetic construct
  REGION 1..13: note = Synthetic
WIGEINPTNGRTN

SEQ ID NO: 120 - protein, 6 aa, synthetic construct
  REGION 1..6: note = Synthetic
ARGTRA

SEQ ID NO: 121 - protein, 7 aa, synthetic construct
  REGION 1..7: note = Synthetic
YSNLAWY

SEQ ID NO: 122 - protein, 10 aa, synthetic construct
  REGION 1..10: note = Synthetic
LLVYDATNLA

SEQ ID NO: 123 - protein, 8 aa, synthetic construct
  REGION 1..8: note = Synthetic
QHFWGTPL

SEQ ID NO: 124 - protein, 116 aa, synthetic construct
  REGION 1..116: note = Synthetic
QVQLQQPGAELVKPGASVKLSCKASGYTFTSYWMHWVKQRPGQGLEWIGEINPTNGRTNYIEKFKSKATLTVDKSSSTAYMQLSSLTSEDSAVYYCARGTRAYHYWGQGTSVTVSS

SEQ ID NO: 125 - protein, 107 aa, synthetic construct
  REGION 1..107: note = Synthetic
DIQMTQSPASLSVSVGETVTITCRASDNLYSNLAWYQQKQGKSPQLLVYDATNLADGVPSRFSGSGSGTQYSLKINSLQSEDFGTYYCQHFWGTPLTFGAGTKLELK

SEQ ID NO: 126 - protein, 9 aa, synthetic construct
  REGION 1..9: note = Synthetic
QHFAGTPLT

SEQ ID NO: 127 - protein, 8 aa, synthetic construct
  REGION 1..8: note = Synthetic
QHFAGTPL

SEQ ID NO: 128 - protein, 116 aa, synthetic construct
  REGION 1..116: note = Synthetic
EVQLVQSGAEVKKPGASVKVSCKASGYTFTSYWMHWVRQAPGQRLEWIGEINPTNGRTNYIEKFKSRATLTVDKSASTAYMELSSLRSEDTAVYYCARGTRAYHYWGQGTMVTVSS

SEQ ID NO: 129 - protein, 107 aa, synthetic construct
  REGION 1..107: note = Synthetic
DIQMTQSPSSLSASVGDRVTITCRASDNLYSNLAWYQQKPGKSPKLLVYDATNLADGVPSRFSGSGSGTDYTLTISSLQPEDFATYYCQHFWGTPLTFGQGTKVEIK

SEQ ID NO: 130 - protein, 330 aa, synthetic construct [sequence omitted]

SEQ ID NO: 131 - protein, 416 aa, Homo sapiens
MVDHLLPVDENFSSPKCPVGYLGDRLVGRRAYHMLPSPVSEDDSDASSPCSCSSPDSQALCSCYGGGLGTESQDSILDFLLSQATLGSGGGSGSSIGASSGPVAWGPWRRAAAPVKGEHFCLPEFPLGDPDDVPRPFQPTLEEIEEFLEENMEPGVKEVPEGNSKDLDACSQLSAGPHKSHLHPGSSGRERCSPPPGGASAGGAQGPGGGPTPDGPIPVLLQIQPVPVKQESGTGPASPGQAPENVKVAQLLVNIQGQTFALVPQVVPSSNLNLPSKFVRIAPVPIAAKPVGSGPLGPGPAGLLMGQKFPKNPAAELIKMHKCTFPGCSKMYTKSSHLKAHLRRHTGEKPFACTWPGCGWRFSRSDELSRHRRSHSGVKPYQCPVCEKKFARSDHLSKHIKVHRFPRSSRSVRSVN

SEQ ID NO: 132 - protein, 446 aa, synthetic construct
  REGION 1..446: note = Synthetic
QVQLQQPGAELVKPGASVKLSCKASGYTFTSYWMHWVKQRPGQGLEWIGEINPTNGRTNYIEKFKSKATLTVDKSSSTAYMQLSSLTSEDSAVYYCARGTRAYHYWGQGTSVTVSSASTKGPSVFPLAPSSKSTSGGTAALGCLVKDYFPEPVTVSWNSGALTSGVHTFPAVLQSSGLYSLSSVVTVPSSSLGTQTYICNVNHKPSNTKVDKKVEPKSCDKTHTCPPCPAPELLGGPSVFLFPPKPKDTLMISRTPEVTCVVVDVSHEDPEVKFNWYVDGVEVHNAKTKPREEQYNSTYRVVSVLTVLHQDWLNGKEYKCKVSNKALPAPIEKTISKAKGQPREPQVYTLPPSRDELTKNQVSLTCLVKGFYPSDIAVEWESNGQPENNYKTTPPVLDSDGSFFLYSKLTVDKSRWQQGNVFSCSVMHEALHNHYTQKSLSLSPGK

SEQ ID NO: 133 - protein, 214 aa, synthetic construct
  REGION 1..214: note = Synthetic
DIQMTQSPASLSVSVGETVTITCRASDNLYSNLAWYQQKQGKSPQLLVYDATNLADGVPSRFSGSGSGTQYSLKINSLQSEDFGTYYCQHFWGTPLTFGAGTKLELKRTVAAPSVFIFPPSDEQLKSGTASVVCLLNNFYPREAKVQWKVDNALQSGNSQESVTEQDSKDSTYSLSSTLTLSKADYEKHKVYACEVTHQGLSSPVTKSFNRGEC

SEQ ID NO: 134 - protein, 446 aa, synthetic construct
  REGION 1..446: note = Synthetic
EVQLVQSGAEVKKPGASVKVSCKASGYTFTSYWMHWVRQAPGQRLEWIGEINPTNGRTNYIEKFKSRATLTVDKSASTAYMELSSLRSEDTAVYYCARGTRAYHYWGQGTMVTVSSASTKGPSVFPLAPSSKSTSGGTAALGCLVKDYFPEPVTVSWNSGALTSGVHTFPAVLQSSGLYSLSSVVTVPSSSLGTQTYICNVNHKPSNTKVDKKVEPKSCDKTHTCPPCPAPELLGGPSVFLFPPKPKDTLMISRTPEVTCVVVDVSHEDPEVKFNWYVDGVEVHNAKTKPREEQYNSTYRVVSVLTVLHQDWLNGKEYKCKVSNKALPAPIEKTISKAKGQPREPQVYTLPPSRDELTKNQVSLTCLVKGFYPSDIAVEWESNGQPENNYKTTPPVLDSDGSFFLYSKLTVDKSRWQQGNVFSCSVMHEALHNHYTQKSLSLSPGK

SEQ ID NO: 135 - protein, 214 aa, synthetic construct
  REGION 1..214: note = Synthetic
DIQMTQSPSSLSASVGDRVTITCRASDNLYSNLAWYQQKPGKSPKLLVYDATNLADGVPSRFSGSGSGTDYTLTISSLQPEDFATYYCQHFWGTPLTFGQGTKVEIKRTVAAPSVFIFPPSDEQLKSGTASVVCLLNNFYPREAKVQWKVDNALQSGNSQESVTEQDSKDSTYSLSSTLTLSKADYEKHKVYACEVTHQGLSSPVTKSFNRGEC

SEQ ID NO: 136 - protein, 226 aa, synthetic construct
  REGION 1..226: note = Synthetic
QVQLQQPGAELVKPGASVKLSCKASGYTFTSYWMHWVKQRPGQGLEWIGEINPTNGRTNYIEKFKSKATLTVDKSSSTAYMQLSSLTSEDSAVYYCARGTRAYHYWGQGTSVTVSSASTKGPSVFPLAPSSKSTSGGTAALGCLVKDYFPEPVTVSWNSGALTSGVHTFPAVLQSSGLYSLSSVVTVPSSSLGTQTYICNVNHKPSNTKVDKKVEPKSCDKTHTCP

SEQ ID NO: 137 - protein, 226 aa, synthetic construct
  REGION 1..226: note = Synthetic
EVQLVQSGAEVKKPGASVKVSCKASGYTFTSYWMHWVRQAPGQRLEWIGEINPTNGRTNYIEKFKSRATLTVDKSASTAYMELSSLRSEDTAVYYCARGTRAYHYWGQGTMVTVSSASTKGPSVFPLAPSSKSTSGGTAALGCLVKDYFPEPVTVSWNSGALTSGVHTFPAVLQSSGLYSLSSVVTVPSSSLGTQTYICNVNHKPSNTKVDKKVEPKSCDKTHTCP

SEQ ID NO: 138 - protein, 1581 aa, synthetic construct
  REGION 1..1581: note = Synthetic
MKAQGETEESEKLSKMSSLLERLHAKFNQNRPWSETIKLVRQVMEKRVVMSSGGHQHLVSCLETLQKALKVTSLPAMTDRLESIARQNGLGSHLSASGTECYITSDMFYVEVQLDPAGQLCDVKVAHHGENPVSCPELVQQLREKNFDEFSKHLKGLVNLYNLPGDNKLKTKMYLALQSLEQDLSKMAIMYWKATNAGPLDKILHGSVGYLTPRSGGHLMNLKYYVSPSDLLDDKTASPIILHENNVSRSLGMNASVTIEGTSAVYKLPIAPLIMGSHPVDNKWTPSFSSITSANSVDLPACFFLKFPQPIPVSRAFVQKLQNCTGIPLFETQPTYAPLYELITQFELSKDPDPIPLNHNMRFYAALPGQQHCYFLNKDAPLPDGRSLQGTLVSKITFQHPGRVPLILNLIRHQVAYNTLIGSCVKRTILKEDSPGLLQFEVCPLSESRFSVSFQHPVNDSLVCVVMDVQDSTHVSCKLYKGLSDALICTDDFIAKVVQRCMSIPVTMRAIRRKAETIQADTPALSLIAETVEDMVKKNLPPASSPGYGMTTGNNPMSGTTTPTNTFPGGPITTLFNMSMSIKDRHESVGHGEDFSKVSQNPILTSLLQITGNGGSTIGSSPTPPHHTPPPVSSMAGNTKNHPMLMNLLKDNPAQDFSTLYGSSPLERQNSSSGSPRMEICSGSNKTKKKKSSRLPPEKPKHQTEDDFQRELFSMDVDSQNPIFDVNMTADTLDTPHITPAPSQCSTPPTTYPQPVPHPQPSIQRMVRLSSSDSIGPDVTDILSDIAEEASKLPSTSDDCPAIGTPLRDSSSSGHSQSTLFDSDVFQTNNNENPYTDPADLIADAAGSPSSDSPTNHFFHDGVDFNPDLLNSQSQSGFGEEYFDESSQSGDNDDFKGFASQALNTLGVPMLGGDNGETKFKGNNQADTVDFSIISVAGKALAPADLMEHHSGSQGPLLTTGDLGKEKTQKRVKEGNGTSNSTLSGPGLDSKPGKRSRTPSNDGKSKDKPPKRKKADTEGKSPSHSSSNRPFTPPTSTGGSKSPGSAGRSQTPPGVATPPIPKITIQIPKGTVMVGKPSSHSQYTSSGSVSSSGSKSHHSHSSSSSSSASTSGKMKSSKSEGSSSSKLSSSMYSSQGSSGSSQSKNSSQSGGKPGSSPITKHGLSSGSSSTKMKPQGKPSSLMNPSLSKPNISPSHSRPPGGSDKLASPMKPVPGTPPSSKAKSPISSGSGGSHMSGTSSSSGMKSSSGLGSSGSLSQKTPPSSNSCTASSSSFSSSGSSMSSSQNQHGSSKGKSPSRNKKPSLTAVIDKLKHGVVTSGPGGEDPLDGQMGVSTNSSSHPMSSKHNMSGGEFQGKREKSDKDKSKVSTSGSSVDSSKKTSESKNVGSTGVAKIIISKHDGGSPSIKAKVTLQKPGESSGEGLRPQMASSKNYGSPLISGSTPKHERGSPSHSKSPAYTPQNLDSESESGSSIAEKSYQNSPSSDDGIRPLPEYSTEKHKKHKKEKKKVKDKDRDRDRDKDRDKKKSHSIKPESWSKSPISSDQSLSMTSNTILSADRPSRLSPDFMIGEEDDDLMDVALIGN

SEQ ID NO: 139 - protein, 2174 aa, Homo sapiens
MSASFVPNGASLEDCHCNLFCLADLTGIKWKKYVWQGPTSAPILFPVTEEDPILSSFSRCLKADVLGVWRRDQRPGRRELWIFWWGEDPSFADLIHHDLSEEEDGVWENGLSYECRTLLFKAVHNLLERCLMNRNFVRIGKWFVKPYEKDEKPINKSEHLSCSFTFFLHGDSNVCTSVEINQHQPVYLLSEEHITLAQQSNSPFQVILCPFGLNGTLTGQAFKMSDSATKKLIGEWKQFYPISCCLKEMSEEKQEDMDWEDDSLAAVEVLVAGVRMIYPACFVLVPQSDIPTPSPVGSTHCSSSCLGVHQVPASTRDPAMSSVTLTPPTSPEEVQTVDPQSVQKWVKFSSVSDGFNSDSTSHHGGKIPRKLANHVVDRVWQECNMNRAQNKRKYSASSGGLCEEATAAKVASWDFVEATQRTNCSCLRHKNLKSRNAGQQGQAPSLGQQQQILPKHKTNEKQEKSEKPQKRPLTPFHHRVSVSDDVGMDADSASQRLVISAPDSQVRFSNIRTNDVAKTPQMHGTEMANSPQPPPLSPHPCDVVDEGVTKTPSTPQSQHFYQMPTPDPLVPSKPMEDRIDSLSQSFPPQYQEAVEPTVYVGTAVNLEEDEANIAWKYYKFPKKKDVEFLPPQLPSDKFKDDPVGPFGQESVTSVTELMVQCKKPLKVSDELVQQYQIKNQCLSAIASDAEQEPKIDPYAFVEGDEEFLFPDKKDRQNSEREAGKKHKVEDGTSSVTVLSHEEDAMSLFSPSIKQDAPRPTSHARPPSTSLIYDSDLAVSYTDLDNLFNSDEDELTPGSKKSANGSDDKASCKESKTGNLDPLSCISTADLHKMYPTPPSLEQHIMGFSPMNMNNKEYGSMDTTPGGTVLEGNSSSIGAQFKIEVDEGFCSPKPSEIKDFSYVYKPENCQILVGCSMFAPLKTLPSQYLPPIKLPEECIYRQSWTVGKLELLSSGPSMPFIKEGDGSNMDQEYGTAYTPQTHTSFGMPPSSAPPSNSGAGILPSPSTPRFPTPRTPRTPRTPRGAGGPASAQGSVKYENSDLYSPASTPSTCRPLNSVEPATVPSIPEAHSLYVNLILSESVMNLFKDCNFDSCCICVCNMNIKGADVGVYIPDPTQEAQYRCTCGFSAVMNRKFGNNSGLFLEDELDIIGRNTDCGKEAEKRFEALRATSAEHVNGGLKESEKLSDDLILLLQDQCTNLFSPFGAADQDPFPKSGVISNWVRVEERDCCNDCYLALEHGRQFMDNMSGGKVDEALVKSSCLHPWSKRNDVSMQCSQDILRMLLSLQPVLQDAIQKKRTVRPWGVQGPLTWQQFHKMAGRGSYGTDESPEPLPIPTFLLGYDYDYLVLSPFALPYWERLMLEPYGSQRDIAYVVLCPENEALLNGAKSFFRDLTAIYESCRLGQHRPVSRLLTDGIMRVGSTASKKLSEKLVAEWFSQAADGNNEAFSKLKLYAQVCRYDLGPYLASLPLDSSLLSQPNLVAPTSQSLITPPQMTNTGNANTPSATLASAASSTMTVTSGVAISTSVATANSTLTTASTSSSSSSNLNSGVSSNKLPSFPPFGSMNSNAAGSMSTQANTVQSGQLGGQQTSALQTAGISGESSSLPTQPHPDVSESTMDRDKVGIPTDGDSHAVTYPPAIVVYIIDPFTYENTDESTNSSSVWTLGLLRCFLEMVQTLPPHIKSTVSVQIIPCQYLLQPVKHEDREIYPQHLKSLAFSAFTQCRRPLPTSTNVKTLTGFGPGLAMETALRSPDRPECIRLYAPPFILAPVKDKQTELGETFGEAGQKYNVLFVGYCLSHDQRWILASCTDLYGELLETCIINIDVPNRARRKKSSARKFGLQKLWEWCLGLVQMSSLPWRVVIGRLGRIGHGELKDWSCLLSRRNLQSLSKRLKDMCRMCGISAADSPSILSACLVAMEPQGSFVIMPDSVSTGSVFGRSTTLNMQTSQLNTPQDTSCTHILVFPTSASVQVASATYTTENLDLAFNPNNDGADGMGIFDLLDTGDDLDPDIINILPASPTGSPVHSPGSHYPHGGDAGKGQSTDRLLSTEPHEEVPNILQQPLALGYFVSTAKAGPLPDWFWSACPQAQYQCPLFLKASLHLHVPSVQSDELLHSKHSHPLDSNQTSDVLRFVLEQYNALSWLTCDPATQDRRSCLPIHFVVLNQLYNFIMNML

SEQ ID NO: 140 - protein, 514 aa, synthetic construct
  REGION 1..514: note = Synthetic
MGRKKIQIQRITDERNRQVTFTKRKFGLMKKAYELSVLCDCEIALIIFNHSNKLFQYASTDMDKVLLKYTEYNEPHESRTNADIIETLRKKGFNGCDSPEPDGEDSLEQSPLLEDKYRRASEELDGLFRRYGSTVPAPNFAMPVTVPVSNQSSLQFSNPSGSLVTPSLVTSSLTDPRLLSPQQPALQRNSVSPGLPQRPASAGAMLGGDLNSANGACPSPVGNGYVSARASPGLLPVANGNSLNKVIPAKSPPPPTHSTQLGAPSRKPDLRVITSQAGKGLMHHLNNAQRLGVSQSTHSLTTPVVSVATPSLLSQGLPFSSMPTAYNTDYQLTSAELSSLPAFSSPGGLSLGNVTAWQQPQQPQQPQQPQPPQQQPPQPQQPQPQQPQQPQQPPQQQSHLVPVSLSNLIPGSPLPHVGAALTVTTHPHISIKSEPVSPSRERSPAPPPPAVFPAARPEPGDGLSSPAGGSYETGDRDDGRGDFGPTLGLLRPAPEPEAEGSAVKRMRLDTWTLK

SEQ ID NO: 141 - protein, 521 aa, synthetic construct
  REGION 1..521: note = Synthetic
MGRKKIQIQRITDERNRQVTFTKRKFGLMKKAYELSVLCDCEIALIIFNHSNKLFQYASTDMDKVLLKYTEYNEPHESRTNADIIETLRKKGFNGCDSPEPDGEDSLEQSPLLEDKYRRASEELDGLFRRYGSTVPAPNFAMPVTVPVSNQSSLQFSNPSGSLVTPSLVTSSLTDPRLLSPQQPALQRNSVSPGLPQRPASAGAMLGGDLNSANGACPSPVGNGYVSARASPGLLPVANGNSLNKVIPAKSPPPPTHSTQLGAPSRKPDLRVITSQAGKGLMHHLTEDHLDLNNAQRLGVSQSTHSLTTPVVSVATPSLLSQGLPFSSMPTAYNTDYQLTSAELSSLPAFSSPGGLSLGNVTAWQQPQQPQQPQQPQPPQQQPPQPQQPQPQQPQQPQQPPQQQSHLVPVSLSNLIPGSPLPHVGAALTVTTHPHISIKSEPVSPSRERSPAPPPPAVFPAARPEPGDGLSSPAGGSYETGDRDDGRGDFGPTLGLLRPAPEPEAEGSAVKRMRLDTWTLK

SEQ ID NO: 142 - protein, 505 aa, Homo sapiens
MAESAGASSFFPLVVLLLAGSGGSGPRGVQALLCACTSCLQANYTCETDGACMVSIFNLDGMEHHVRTCIPKVELVPAGKPFYCLSSEDLRNTHCCYTDYCNRIDLRVPSGHLKEPEHPSMWGPVELVGIIAGPVFLLFLIIIIVFLVINYHQRVYHNRQRLDMEDPSCEMCLSKDKTLQDLVYDLSTSGSGSGLPLFVQRTVARTIVLQEIIGKGRFGEVWRGRWRGGDVAVKIFSSREERSWFREAEIYQTVMLRHENILGFIAADNKDNGTWTQLWLVSDYHEHGSLFDYLNRYTVTIEGMIKLALSAASGLAHLHMEIVGTQGKPGIAHRDLKSKNILVKKNGMCAIADLGLAVRHDAVTDTIDIAPNQRVGTKRYMAPEVLDETINMKHFDSFKCADIYALGLVYWEIARRCNSGGVHEEYQLPYYDLVPSDPSIEEMRKVVCDQKLRPNIPNWWQSYEALRVMGKMMRECWYANGAARLTALRIKKTLSQLSVQEDVKI

SEQ ID NO: 143 - protein, 453 aa, Homo sapiens
MVSIFNLDGMEHHVRTCIPKVELVPAGKPFYCLSSEDLRNTHCCYTDYCNRIDLRVPSGHLKEPEHPSMWGPVELVGIIAGPVFLLFLIIIIVFLVINYHQRVYHNRQRLDMEDPSCEMCLSKDKTLQDLVYDLSTSGSGSGLPLFVQRTVARTIVLQEIIGKGRFGEVWRGRWRGGDVAVKIFSSREERSWFREAEIYQTVMLRHENILGFIAADNKDNGTWTQLWLVSDYHEHGSLFDYLNRYTVTIEGMIKLALSAASGLAHLHMEIVGTQGKPGIAHRDLKSKNILVKKNGMCAIADLGLAVRHDAVTDTIDIAPNQRVGTKRYMAPEVLDETINMKHFDSFKCADIYALGLVYWEIARRCNSGGVHEEYQLPYYDLVPSDPSIEEMRKVVCDQKLRPNIPNWWQSYEALRVMGKMMRECWYANGAARLTALRIKKTLSQLSVQEDVKI

SEQ ID NO: 144 - protein, 546 aa, Homo sapiens
MAESAGASSFFPLVVLLLAGSGGSGPRGVQALLCACTSCLQANYTCETDGACMVSIFNLDGMEHHVRTCIPKVELVPAGKPFYCLSSEDLRNTHCCYTDYCNRIDLRVPSGHLKEPEHPSMWGPVELVGIIAGPVFLLFLIIIIVFLVINYHQRVYHNRQRLDMEDPSCEMCLSKDKTLQDLVYDLSTSGSGSGLPLFVQRTVARTIVLQEIIGKGRFGEVWRGRWRGGDVAVKIFSSREERSWFREAEIYQTVMLRHENILGFIAADNKADCSFLTLPWEVVMVSAAPKLRSLRLQYKGGRGRARFLFPLNNGTWTQLWLVSDYHEHGSLFDYLNRYTVTIEGMIKLALSAASGLAHLHMEIVGTQGKPGIAHRDLKSKNILVKKNGMCAIADLGLAVRHDAVTDTIDIAPNQRVGTKRYMAPEVLDETINMKHFDSFKCADIYALGLVYWEIARRCNSGGVHEEYQLPYYDLVPSDPSIEEMRKVVCDQKLRPNIPNWWQSYEALRVMGKMMRECWYANGAARLTALRIKKTLSQLSVQEDVKI

SEQ ID NO: 145 - protein, 426 aa, Homo sapiens
MPLLWLRGFLLASCWIIVRSSPTPGSEGHSAAPDCPSCALAALPKDVPNSQPEMVEAVKKHILNMLHLKKRPDVTQPVPKAALLNAIRKLHVGKVGENGYVEIEDDIGRRAEMNELMEQTSEIITFAESGTARKTLHFEISKEGSDLSVVERAEVWLFLKVPKANRTRTKVTIRLFQQQKHPQGSLDTGEEAEEVGLKGERSELLLSEKVVDARKSTWHVFPVSSSIQRLLDQGKSSLDVRIACEQCQESGASLVLLGKKKKKEEEGEGKKKGGGEGGAGADEEKEQSHRPFLMLQARQSEDHPHRRRRRGLECDGKVNICCKKQFFVSFKDIGWNDWIIAPSGYHANYCEGECPSHIAGTSGSSLSFHSTVINHYRMRGHSPFANLKSCCVPTKLRPMSMLYYDDGQNIIKKDIQNMIVEECGCS

SEQ ID NO: 146 - protein, 375 aa, Homo sapiens
MQKLQLCVYIYLFMLIVAGPVDLNENSEQKENVEKEGLCNACTWRQNTKSSRIEAIKIQILSKLRLETAPNISKDVIRQLLPKAPPLRELIDQYDVQRDDSSDGSLEDDDYHATTETIITMPTESDFLMQVDGKPKCCFFKFSSKIQYNKVVKAQLWIYLRPVETPTTVFVQILRLIKPMKDGTRYTGIRSLKLDMNPGTGIWQSIDVKTVLQNWLKQPESNLGIEIKALDENGHDLAVTFPGPGEDGLNPFLEVKVTDTPKRSRRDFGLDCDEHSTESRCCRYPLTVDFEAFGWDWIIAPKRYKANYCSGECEFVFLQKYPHTHLVHQANPRGSAGPCCTPTKMSPINMLYFNGKEQIIYGKIPAMVVDRCGCS

SEQ ID NO: 147 - DNA, 2819 bp, Homo sapiens
  source 1..2819: mol_type = genomic DNA
agattcactggtgtggcaagttgtctctcagactgtacatgcattaaaattttgcttggcattactcaaaagcaaaagaaaagtaaaaggaagaaacaagaacaagaaaaaagattatattgattttaaaatcatgcaaaaactgcaactctgtgtttatatttacctgtttatgctgattgttgctggtccagtggatctaaatgagaacagtgagcaaaaagaaaatgtggaaaaagaggggctgtgtaatgcatgtacttggagacaaaacactaaatcttcaagaatagaagccattaagatacaaatcctcagtaaacttcgtctggaaacagctcctaacatcagcaaagatgttataagacaacttttacccaaagctcctccactccgggaactgattgatcagtatgatgtccagagggatgacagcagcgatggctctttggaagatgacgattatcacgctacaacggaaacaatcattaccatgcctacagagtctgattttctaatgcaagtggatggaaaacccaaatgttgcttctttaaatttagctctaaaatacaatacaataaagtagtaaaggcccaactatggatatatttgagacccgtcgagactcctacaacagtgtttgtgcaaatcctgagactcatcaaacctatgaaagacggtacaaggtatactggaatccgatctctgaaacttgacatgaacccaggcactggtatttggcagagcattgatgtgaagacagtgttgcaaaattggctcaaacaacctgaatccaacttaggcattgaaataaaagctttagatgagaatggtcatgatcttgctgtaaccttcccaggaccaggagaagatgggctgaatccgtttttagaggtcaaggtaacagacacaccaaaaagatccagaagggattttggtcttgactgtgatgagcactcaacagaatcacgatgctgtcgttaccctctaactgtggattttgaagcttttggatgggattggattatcgctcctaaaagatataaggccaattactgctctggagagtgtgaatttgtatttttacaaaaatatcctcatactcatctggtacaccaagcaaaccccagaggttcagcaggcccttgctgtactcccacaaagatgtctccaattaatatgctatattttaatggcaaagaacaaataatatatgggaaaattccagcgatggtagtagaccgctgtgggtgctcatgagatttatattaagcgttcataacttcctaaaacatggaaggttttcccctcaacaattttgaagctgtgaaattaagtaccacaggctataggcctagagtatgctacagtcacttaagcataagctacagtatgtaaactaaaagggggaatatatgcaatggttggcatttaaccatccaaacaaatcatacaagaaagttttatgatttccagagtttttgagctagaaggagatcaaattacatttatgttcctatatattacaacatcggcgaggaaatgaaagcgattctccttgagttctgatgaattaaaggagtatgctttaaagtctatttctttaaagttttgtttaatatttacagaaaaatccacatacagtattggtaaaatgcaggattgttatataccatcattcgaatcatccttaaacacttgaatttatattgtatggtagtatacttggtaagataaaattccacaaaaatagggatggtgcagcatatgcaatttccattcctattataattgacacagtacattaacaatccatgccaacggtgctaatacgataggctgaatgtctgaggctaccaggtttatcacataaaaaacattcagtaaaatagtaagtttctcttttcttcaggtgcattttcctacacctccaaatgaggaatggattttctttaatgtaagaagaatcatttttctagaggttggctttcaattctgtagcatacttggagaaactgcattatcttaaaaggcagtcaaatggtgtttgtttttatcaaaatgtcaaaataacatacttggagaagtatgtaattttgtctttggaaaattacaacactgcctttgcaacactgcagtttttatggtaaaataatagaaatgatcgactctatcaatattgtataaaaagactgaaacaatgcatttatataatatgtatacaatattgttttgtaaataagtgtctccttttttatttactttggtatatttttacactaaggacatttcaaattaagtactaaggcacaaagacatgtcatgcatcacagaaaagcaactacttatatttcagagcaaattagcagattaaatagtggtcttaaaactccatatgttaatgattagatggttatattacaatcattttatatttttttacatgattaacattcacttatggattcatgatggctgtataaagtgaatttgaaatttcaatggtttactgtcattgtgtttaaatctcaacgttccattattttaatacttgcaaaaacattactaagtataccaaaataattgactctattatctgaaatgaagaataaactgatgctatctcaacaataactgttacttttattttataatttgataatgaatatatttctgcatttatttacttctgttttgtaaattgggattttgttaatcaaatttattgtactatgactaaatgaaattatttcttacatctaatttgtagaaacagtataagttatattaaagtgttttcacatttttttgaaagaca

SEQ ID NO: 148 - DNA, 2705 bp, Rattus norvegicus
  source 1..2705: mol_type = genomic DNA
aggactccctggcgtggcaggttgtctctcggacggtacatgcactaatatttcacttggcattactcaaaagcaaaaagaagaaataagaacaagggaaaaaaaaagattgtgctgatttttaaaatgatgcaaaaactgcaaatgtatgtttatatttacctgttcatgctgattgctgctggcccagtggatctaaatgagggcagtgagagagaagaaaatgtggaaaaagaggggctgtgtaatgcatgtgcgtggagacaaaacacgaggtactccagaatagaagccataaaaattcaaatcctcagtaagctgcgcctggaaacagctcctaacatcagcaaagatgctataagacaacttctgccaagagcgcctccactccgggaactgatcgatcagtacgacgtccagagggatgacagcagtgatggctctttggaagatgacgattatcacgctaccacggaaacaatcattaccatgcctacagagtctgactttctaatgcaagcggatggcaagcccaaatgttgcttttttaaatttagctctaaaatacagtacaacaaagtagtaaaagcccaactgtggatatatctcagacccgtcaagactcctacaacagtgtttgtgcaaatcctgagactcatcaaacccatgaaagacggtacaaggtatactggaatccgatctctgaaacttgacatgagcccaggcactggtatttggcagagtattgatgtgaagacagtgttgcaaaattggctcaaacagcctgaatccaacttaggcattgaaatcaaagctttggatgagaatggccatgatcttgctgtaaccttcccaggaccaggagaagatgggctgaatccctttttagaagtcaaggtgacagacacacccaagaggtcccggagagactttgggcttgactgcgatgagcactccacggaatcccggtgctgccgctaccccctcacggtcgattttgaagcctttggatgggactggattatcgcacccaaaagatataaggccaattactgctcaggagagtgtgaatttgtgtttttacaaaaatatccgcatactcatcttgtgcaccaagcaaaccccagaggctcagcaggcccttgctgcactccgacaaaaatgtctcccattaatatgctatattttaatggcaaagaacaaataatatatgggaaaattccagccatggtagtagaccgctgtgggtgctcatgagctttgcattaggttagaaatttcccaagtcatggaaggtcttcccctcaatttcgaaactgtgaattcaagcaccacaggctgtaggccttgagtatgctctagtaacgtaagcacaagctacagtgtatgaactaaaagagagaatagatgcaatggttggcattcaaccaccaaaataaaccatactataggatgttgtatgatttccagagtttttgaaatagatggagatcaaattacatttatgtccatatatgtatattacaactacaatctaggcaaggaagtgagagcacatcttgtggtctgctgagttaggagggtatgattaaaaggtaaagtcttatttcctaacagtttcacttaatatttacggaagaatctatatgtagcctttgtaaagtgtaggattgttatcatttaaaaacatcatgtacacttatatttgtattgtatacttggtaagataaaattccacaaagtaggaatggggccttacatacacattgccattcctattataattggacaatccaccacggtgctaatgcagtgctgaatggctcctactggacctctcgatagaacactctacaaagtacgagtctctctctcccttccaggtgcatctccacacacacagcactaagtgttcaatgcattttctttaaggaaagaagaatctttttttctagaggtcaactttcagtcaactctagcacagcgggagtgactgctgcatcttaaaaggcagccaaacagtattcattttttaatctaaatttcaaaatcactgtctgcctttatcacatggcaattttgtggtaaaataatggaaatgactggttctatcaatattgtataaaagactctgaaacaattacatttatataatatgtatacaatattgttttgtaaataagtgtctccttttatatttactttggtatatttttacactaatgaaatttcaaatcattaaagtacaaagacatgtcatgtatcacaaaaaaggtgactgcttctatttcagagtgaattagcagattcaatagtggtcttaaaactctgtatgttaagattagaaggttatattacaatcaatttatgtattttttacattatcaacattcacttatggtttcatggtggctgtatctatgaatgtggctcccagtcaaatttcaatgccccaccattttaaaaattacaagcattactaaacataccaacatgtatctaaagaaatacaaatatggtatctcaataacagctacttttttattttataatttgacaatgaatacatttcttttatttacttcagttttataaattggaactttgtttatcaaatgtattgtactcatagctaaatgaaattatttcttacataaaaatgtgtagaaactataaattaaagtgttttcacatttttgaaaggc

SEQ ID NO: 149 - DNA, 19 bp, synthetic construct
  misc_feature 1..19: note = Synthetic
  source 1..19: mol_type = other DNA
tttggaagatgacgattat

SEQ ID NO: 150 - DNA, 19 bp, synthetic construct
  misc_feature 1..19: note = Synthetic
  source 1..19: mol_type = other DNA
tggaagatgacgattatca

SEQ ID NO: 151 - DNA, 19 bp, synthetic construct
  misc_feature 1..19: note = Synthetic
  source 1..19: mol_type = other DNA
agatgacgattatcacgct

SEQ ID NO: 152 - DNA, 19 bp, synthetic construct
  misc_feature 1..19: note = Synthetic
  source 1..19: mol_type = other DNA
acaatcattaccatgccta

SEQ ID NO: 153 - DNA, 19 bp, synthetic construct
  misc_feature 1..19: note = Synthetic
  source 1..19: mol_type = other DNA
ctacaacagtgtttgtgca

SEQ ID NO: 154 - DNA, 19 bp, synthetic construct
  misc_feature 1..19: note = Synthetic
  source 1..19: mol_type = other DNA
acaacagtgtttgtgcaaa

SEQ ID NO: 155 - DNA, 19 bp, synthetic construct
  misc_feature 1..19: note = Synthetic
  source 1..19: mol_type = other DNA
atgaaagacggtacaaggt

SEQ ID NO: 156 - DNA, 19 bp, synthetic construct
  misc_feature 1..19: note = Synthetic
  source 1..19: mol_type = other DNA
aatccgatctctgaaactt

SEQ ID NO: 157 - DNA, 19 bp, synthetic construct
  misc_feature 1..19: note = Synthetic
  source 1..19: mol_type = other DNA
tccgatctctgaaacttga

SEQ ID NO: 158 - DNA, 19 bp, synthetic construct
  misc_feature 1..19: note = Synthetic
  source 1..19: mol_type = other DNA
tgtgaagacagtgttgcaa

SEQ ID NO: 159 - DNA, 19 bp, synthetic construct
  misc_feature 1..19: note = Synthetic
  source 1..19: mol_type = other DNA
gacagtgttgcaaaattgg

SEQ ID NO: 160 - DNA, 19 bp, synthetic construct
  misc_feature 1..19: note = Synthetic
  source 1..19: mol_type = other DNA
cagtgttgcaaaattggct

SEQ ID NO: 161 - DNA, 19 bp, synthetic construct
  misc_feature 1..19: note = Synthetic
  source 1..19: mol_type = other DNA
gttgcaaaattggctcaaa

SEQ ID NO: 162 - DNA, 19 bp, synthetic construct
  misc_feature 1..19: note = Synthetic
  source 1..19: mol_type = other DNA
cctgaatccaacttaggca

SEQ ID NO: 163 - DNA, 19 bp, synthetic construct
  misc_feature 1..19: note = Synthetic
  source 1..19: mol_type = other DNA
ctgaatccaacttaggcat

SEQ ID NO: 164 - DNA, 19 bp, synthetic construct
  misc_feature 1..19: note = Synthetic
  source 1..19: mol_type = other DNA
aatccaacttaggcattga

SEQ ID NO: 165 - DNA, 19 bp, synthetic construct
  misc_feature 1..19: note = Synthetic
  source 1..19: mol_type = other DNA
atccaacttaggcattgaa

SEQ ID NO: 166 - DNA, 19 bp, synthetic construct
  misc_feature 1..19: note = Synthetic
  source 1..19: mol_type = other DNA
ctgtaaccttcccaggacc

SEQ ID NO: 167 - DNA, 19 bp, synthetic construct
  misc_feature 1..19: note = Synthetic
  source 1..19: mol_type = other DNA
aggagaagatgggctgaat

SEQ ID NO: 168 - DNA, 19 bp, synthetic construct
  misc_feature 1..19: note = Synthetic
  source 1..19: mol_type = other DNA
atgctatattttaatggca

SEQ ID NO: 169 - DNA, 19 bp, synthetic construct
  misc_feature 1..19: note = Synthetic
  source 1..19: mol_type = other DNA
tatattttaatggcaaaga

SEQ ID NO: 170 - DNA, 19 bp, synthetic construct
  misc_feature 1..19: note = Synthetic
  source 1..19: mol_type = other DNA
agaacaaataatatatggg

SEQ ID NO: 171 - DNA, 19 bp, synthetic construct
  misc_feature 1..19: note = Synthetic
  source 1..19: mol_type = other DNA
gaacaaataatatatggga

SEQ ID NO: 172 - DNA, 19 bp, synthetic construct
  misc_feature 1..19: note = Synthetic
  source 1..19: mol_type = other DNA
aacaaataatatatgggaa

SEQ ID NO: 173 - RNA, 21 nt, synthetic construct
  source 1..21: mol_type = other RNA
tctttggaagatgacgattat

SEQ ID NO: 174 - RNA, 21 nt, synthetic construct
  source 1..21: mol_type = other RNA
tttggaagatgacgattatca

SEQ ID NO: 175 - RNA, 21 nt, synthetic construct
  source 1..21: mol_type = other RNA
gaagatgacgattatcacgct

SEQ ID NO: 176 - RNA, 21 nt, synthetic construct
  source 1..21: mol_type = other RNA
aaacaatcattaccatgccta

SEQ ID NO: 177 - RNA, 21 nt, synthetic construct
  source 1..21: mol_type = other RNA
tcctacaacagtgtttgtgca

SEQ ID NO: 178 - RNA, 21 nt, synthetic construct
  source 1..21: mol_type = other RNA
ctacaacagtgtttgtgcaaa

SEQ ID NO: 179 - RNA, 21 nt, synthetic construct
  source 1..21: mol_type = other RNA
ctatgaaagacggtacaaggt

SEQ ID NO: 180 - RNA, 21 nt, synthetic construct
  misc_feature 1..21: note = Synthetic
  source 1..21: mol_type = other RNA
ggaatccgatctctgaaactt

SEQ ID NO: 181 - RNA, 21 nt, synthetic construct
  misc_feature 1..21: note = Synthetic
  source 1..21: mol_type = other RNA
aatccgatctctgaaacttga

SEQ ID NO: 182 - RNA, 21 nt, synthetic construct
  misc_feature 1..21: note = Synthetic
  source 1..21: mol_type = other RNA
gatgtgaagacagtgttgcaa

SEQ ID NO: 183 - RNA, 21 nt, synthetic construct
  misc_feature 1..21: note = Synthetic
  source 1..21: mol_type = other RNA
aagacagtgttgcaaaattgg

SEQ ID NO: 184 - RNA, 21 nt, synthetic construct
  misc_feature 1..21: note = Synthetic
  source 1..21: mol_type = other RNA
gacagtgttgcaaaattggct

SEQ ID NO: 185 - RNA, 21 nt, synthetic construct
  misc_feature 1..21: note = Synthetic
  source 1..21: mol_type = other RNA
gtgttgcaaaattggctcaaa

SEQ ID NO: 186 - RNA, 21 nt, synthetic construct
  misc_feature 1..21: note = Synthetic
  source 1..21: mol_type = other RNA
aacctgaatccaacttaggca

SEQ ID NO: 187 - RNA, 21 nt, synthetic construct
  misc_feature 1..21: note = Synthetic
  source 1..21: mol_type = other RNA
acctgaatccaacttaggcat

SEQ ID NO: 188 - RNA, 21 nt, synthetic construct
  misc_feature 1..21: note = Synthetic
  source 1..21: mol_type = other RNA
tgaatccaacttaggcattga

SEQ ID NO: 189 - RNA, 21 nt, synthetic construct
  misc_feature 1..21: note = Synthetic
  source 1..21: mol_type = other RNA
gaatccaacttaggcattgaa

SEQ ID NO: 190 - RNA, 21 nt, synthetic construct
  misc_feature 1..21: note = Synthetic
  source 1..21: mol_type = other RNA
tgctgtaaccttcccaggacc

SEQ ID NO: 191 - RNA, 21 nt, synthetic construct
  misc_feature 1..21: note = Synthetic
  source 1..21: mol_type = other RNA
ccaggagaagatgggctgaat

SEQ ID NO: 192 - RNA, 21 nt, synthetic construct
  misc_feature 1..21: note = Synthetic
  source 1..21: mol_type = other RNA
atatgctatattttaatggca

SEQ ID NO: 193 - RNA, 21 nt, synthetic construct
  misc_feature 1..21: note = Synthetic
  source 1..21: mol_type = other RNA
gctatattttaatggcaaaga

SEQ ID NO: 194 - RNA, 21 nt, synthetic construct
  misc_feature 1..21: note = Synthetic
  source 1..21: mol_type = other RNA
aaagaacaaataatatatggg

SEQ ID NO: 195 - RNA, 21 nt, synthetic construct
  misc_feature 1..21: note = Synthetic
  source 1..21: mol_type = other RNA
aagaacaaataatatatggga

SEQ ID NO: 196 - RNA, 21 nt, synthetic construct
  misc_feature 1..21: note = Synthetic
  source 1..21: mol_type = other RNA
agaacaaataatatatgggaa

SEQ ID NO: 197 - RNA, 23 nt, synthetic construct
  misc_feature 1..23: note = Synthetic
  source 1..23: mol_type = other RNA
ataatcgtcatcttccaaagagc

SEQ ID NO: 198 - RNA, 23 nt, synthetic construct
  misc_feature 1..23: note = Synthetic
  source 1..23: mol_type = other RNA
tgataatcgtcatcttccaaaga

SEQ ID NO: 199 - RNA, 23 nt, synthetic construct
  misc_feature 1..23: note = Synthetic
  source 1..23: mol_type = other RNA
agcgtgataatcgtcatcttcca

SEQ ID NO: 200 - RNA, 23 nt, synthetic construct
  misc_feature 1..23: note = Synthetic
  source 1..23: mol_type = other RNA
taggcatggtaatgattgtttcc

SEQ ID NO: 201 - RNA, 23 nt, synthetic construct
  misc_feature 1..23: note = Synthetic
  source 1..23: mol_type = other RNA
tgcacaaacactgttgtaggagt

SEQ ID NO: 202 - RNA, 23 nt, synthetic construct
  misc_feature 1..23: note = Synthetic
  source 1..23: mol_type = other RNA
tttgcacaaacactgttgtagga

SEQ ID NO: 203 - RNA, 23 nt, synthetic construct
  misc_feature 1..23: note = Synthetic
  source 1..23: mol_type = other RNA
accttgtaccgtctttcataggt

SEQ ID NO: 204 - RNA, 23 nt, synthetic construct
  misc_feature 1..23: note = Synthetic
  source 1..23: mol_type = other RNA
aagtttcagagatcggattccag

SEQ ID NO: 205 - RNA, 23 nt, synthetic construct
  misc_feature 1..23: note = Synthetic
  source 1..23: mol_type = other RNA
tcaagtttcagagatcggattcc

SEQ ID NO: 206 - RNA, 23 nt, synthetic construct
  misc_feature 1..23: note = Synthetic
  source 1..23: mol_type = other RNA
ttgcaacactgtcttcacatcaa

SEQ ID NO: 207 - RNA, 23 nt, synthetic construct
  misc_feature 1..23: note = Synthetic
  source 1..23: mol_type = other RNA
ccaattttgcaacactgtcttca

SEQ ID NO: 208 - RNA, 23 nt, synthetic construct
  misc_feature 1..23: note = Synthetic
  source 1..23: mol_type = other RNA
agccaattttgcaacactgtctt

SEQ ID NO: 209 - RNA, 23 nt, synthetic construct
  misc_feature 1..23: note = Synthetic
  source 1..23: mol_type = other RNA
tttgagccaattttgcaacactg

SEQ ID NO: 210 - RNA, 23 nt, synthetic construct
  misc_feature 1..23: note = Synthetic
  source 1..23: mol_type = other RNA
tgcctaagttggattcaggttgt

SEQ ID NO: 211 - RNA, 23 nt, synthetic construct
  misc_feature 1..23: note = Synthetic
  source 1..23: mol_type = other RNA
atgcctaagttggattcaggttg

SEQ ID NO: 212 - RNA, 23 nt, synthetic construct
  misc_feature 1..23: note = Synthetic
  source 1..23: mol_type = other RNA
tcaatgcctaagttggattcagg

SEQ ID NO: 213 - RNA, 23 nt, synthetic construct
  misc_feature 1..23: note = Synthetic
  source 1..23: mol_type = other RNA
ttcaatgcctaagttggattcag

SEQ ID NO: 214 - RNA, 23 nt, synthetic construct
  misc_feature 1..23: note = Synthetic
  source 1..23: mol_type = other RNA
ggtcctgggaaggttacagcaag

SEQ ID NO: 215 - RNA, 23 nt, synthetic construct
  misc_feature 1..23: note = Synthetic
  source 1..23: mol_type = other RNA
attcagcccatcttctcctggtc

SEQ ID NO: 216 - RNA, 23 nt, synthetic construct
  misc_feature 1..23: note = Synthetic
  source 1..23: mol_type = other RNA
tgccattaaaatatagcatatta

SEQ ID NO: 217 - RNA, 23 nt, synthetic construct
  misc_feature 1..23: note = Synthetic
  source 1..23: mol_type = other RNA
tctttgccattaaaatatagcat

SEQ ID NO: 218 - RNA, 23 nt, synthetic construct
  misc_feature 1..23: note = Synthetic
  source 1..23: mol_type = other RNA
cccatatattatttgttctttgc

SEQ ID NO: 219 - RNA, 23 nt, synthetic construct
  misc_feature 1..23: note = Synthetic
  source 1..23: mol_type = other RNA
tcccatatattatttgttctttg

SEQ ID NO: 220 - RNA, 23 nt, synthetic construct
  misc_feature 1..23: note = Synthetic
  source 1..23: mol_type = other RNA
ttcccatatattatttgttcttt

SEQ ID NO: 221 - DNA, 19 bp, synthetic construct
  misc_feature 1..19: note = Synthetic
  source 1..19: mol_type = other DNA
acaagacgctccaggatct

SEQ ID NO: 222 - DNA, 19 bp, synthetic construct
  misc_feature 1..19: note = Synthetic
  source 1..19: mol_type = other DNA
gaattgctcatcgagactt

SEQ ID NO: 223 - DNA, 19 bp, synthetic construct
  misc_feature 1..19: note = Synthetic
  source 1..19: mol_type = other DNA
actggtggcagagttatga

SEQ ID NO: 224 - DNA, 19 bp, synthetic construct
  misc_feature 1..19: note = Synthetic
  source 1..19: mol_type = other DNA
tgcaattctggaggagtcc

SEQ ID NO: 225 - DNA, 19 bp, synthetic construct
  misc_feature 1..19: note = Synthetic
  source 1..19: mol_type = other DNA
tccaaagacaagacgctcc

SEQ ID NO: 226 - DNA, 19 bp, synthetic construct
  misc_feature 1..19: note = Synthetic
  source 1..19: mol_type = other DNA
ataataactttgaagccat

SEQ ID NO: 227 - DNA, 19 bp, synthetic construct
  misc_feature 1..19: note = Synthetic
  source 1..19: mol_type = other DNA
gccataacttttaactgga

SEQ ID NO: 228 - DNA, 19 bp, synthetic construct
  misc_feature 1..19: note = Synthetic
  source 1..19: mol_type = other DNA
cttttgttttaatataaga

SEQ ID NO: 229 - DNA, 19 bp, synthetic construct
  misc_feature 1..19: note = Synthetic
  source 1..19: mol_type = other DNA
ccaggatcttgtctacgat

SEQ ID NO: 230 - DNA, 19 bp, synthetic construct
  misc_feature 1..19: note = Synthetic
  source 1..19: mol_type = other DNA
acgggtccctgtttgatta

SEQ ID NO: 231 - DNA, 19 bp, synthetic construct
  misc_feature 1..19: note = Synthetic
  source 1..19: mol_type = other DNA
ttttcaatctggatgggat

SEQ ID NO: 232 - DNA, 19 bp, synthetic construct
  misc_feature 1..19: note = Synthetic
  source 1..19: mol_type = other DNA
aatgtaaataaattgtaat

SEQ ID NO: 233 - DNA, 19 bp, synthetic construct
  misc_feature 1..19: note = Synthetic
  source 1..19: mol_type = other DNA
tcattgttttccttgtcat

SEQ ID NO: 234 - DNA, 19 bp, synthetic construct
  misc_feature 1..19: note = Synthetic
  source 1..19: mol_type = other DNA
tcagcgtgcaggaagacgt

SEQ ID NO: 235 - DNA, 19 bp, synthetic construct
  misc_feature 1..19: note = Synthetic
  source 1..19: mol_type = other DNA
agagcgaattgtgtggaga

SEQ ID NO: 236 - DNA, 19 bp, synthetic construct
  misc_feature 1..19: note = Synthetic
  source 1..19: mol_type = other DNA
atgaggccttgcgagtgat

SEQ ID NO: 237 - DNA, 19 bp, synthetic construct
  misc_feature 1..19: note = Synthetic
  source 1..19: mol_type = other DNA
cctgcatatggagattgtg

SEQ ID NO: 238 - DNA, 19 bp, synthetic construct
  misc_feature 1..19: note = Synthetic
  source 1..19: mol_type = other DNA
tgcgcatgtgccgaggtgt

SEQ ID NO: 239 - DNA, 19 bp, synthetic construct
  misc_feature 1..19: note = Synthetic
  source 1..19: mol_type = other DNA
ctgacaccatagacattgc

SEQ ID NO: 240 - DNA, 19 bp, synthetic construct
  misc_feature 1..19: note = Synthetic
  source 1..19: mol_type = other DNA
cactgctgctatattgact

SEQ ID NO: 241 - DNA, 19 bp, synthetic construct
  misc_feature 1..19: note = Synthetic
  source 1..19: mol_type = other DNA
tctccatctttaacctgga

SEQ ID NO: 242 - DNA, 19 bp, synthetic construct
  misc_feature 1..19: note = Synthetic
  source 1..19: mol_type = other DNA
gacagagcctgggagacgc

SEQ ID NO: 243 - DNA, 19 bp, synthetic construct
  misc_feature 1..19: note = Synthetic
  source 1..19: mol_type = other DNA
tatggagattgtgggcact

SEQ ID NO: 244 - DNA, 19 bp, synthetic construct
  misc_feature 1..19: note = Synthetic
  source 1..19: mol_type = other DNA
aagagattatcggcaaggg

SEQ ID NO: 245 - RNA, 21 nt, synthetic construct
  misc_feature 1..21: note = Synthetic
  source 1..21: mol_type = other RNA
agacaagacgctccaggatct

SEQ ID NO: 246 - RNA, 21 nt, synthetic construct
  misc_feature 1..21: note = Synthetic
  source 1..21: mol_type = other RNA
tggaattgctcatcgagactt

SEQ ID NO: 247 - RNA, 21 nt, synthetic construct
  misc_feature 1..21: note = Synthetic
  source 1..21: mol_type = other RNA
caactggtggcagagttatga

SEQ ID NO: 248 - RNA, 21 nt, synthetic construct
  misc_feature 1..21: note = Synthetic
  source 1..21: mol_type = other RNA
gatgcaattctggaggagtcc

SEQ ID NO: 249 - RNA, 21 nt, synthetic construct
  misc_feature 1..21: note = Synthetic
  source 1..21: mol_type = other RNA
tctccaaagacaagacgctcc

SEQ ID NO: 250 - RNA, 21 nt, synthetic construct
  misc_feature 1..21: note = Synthetic
  source 1..21: mol_type = other RNA
atataataactttgaagccat

SEQ ID NO: 251 - RNA, 21 nt, synthetic construct
  misc_feature 1..21: note = Synthetic
  source 1..21: mol_type = other RNA
aagccataacttttaactgga

SEQ ID NO: 252 - RNA, 21 nt, synthetic construct
  misc_feature 1..21: note = Synthetic
  source 1..21: mol_type = other RNA
atcttttgttttaatataaga

SEQ ID NO: 253 - RNA, 21 nt, synthetic construct
  misc_feature 1..21: note = Synthetic
  source 1..21: mol_type = other RNA
ctccaggatcttgtctacgat

SEQ ID NO: 254 - RNA, 21 nt, synthetic construct
  misc_feature 1..21: note = Synthetic
  source 1..21: mol_type = other RNA
gcacgggtccctgtttgatta

SEQ ID NO: 255 - RNA, 21 nt, synthetic construct
  misc_feature 1..21: note = Synthetic
  source 1..21: mol_type = other RNA
cattttcaatctggatgggat

SEQ ID NO: 256 - RNA, 21 nt, synthetic construct
  misc_feature 1..21: note = Synthetic
  source 1..21: mol_type = other RNA
caaatgtaaataaattgtaat

SEQ ID NO: 257 - RNA, 21 nt, synthetic construct
  misc_feature 1..21: note = Synthetic
  source 1..21: mol_type = other RNA
catcattgttttccttgtcat

SEQ ID NO: 258 - RNA, 21 nt, synthetic construct
  misc_feature 1..21: note = Synthetic
  source 1..21: mol_type = other RNA
gctcagcgtgcaggaagacgt

SEQ ID NO: 259 - RNA, 21 nt, synthetic construct
  misc_feature 1..21: note = Synthetic
  source 1..21: mol_type = other RNA
tgagagcgaattgtgtggaga

SEQ ID NO: 260 - RNA, 21 nt, synthetic construct
  misc_feature 1..21: note = Synthetic
  source 1..21: mol_type = other RNA
ttatgaggccttgcgagtgat

SEQ ID NO: 261 - RNA, 21 nt, synthetic construct
  misc_feature 1..21: note = Synthetic
  source 1..21: mol_type = other RNA
cacctgcatatggagattgtg

SEQ ID NO: 262 - RNA, 21 nt, synthetic construct
  misc_feature 1..21: note = Synthetic
  source 1..21: mol_type = other RNA
agtgcgcatgtgccgaggtgt

SEQ ID NO: 263 - RNA, 21 nt, synthetic construct
  misc_feature 1..21: note = Synthetic
  source 1..21: mol_type = other RNA
cactgacaccatagacattgc

SEQ ID NO: 264 - RNA, 21 nt, synthetic construct
  misc_feature 1..21: note = Synthetic
  source 1..21: mol_type = other RNA
cacactgctgctatattgact

SEQ ID NO: 265 - RNA, 21 nt, synthetic construct
  misc_feature 1..21: note = Synthetic
  source 1..21: mol_type = other RNA
ggtctccatctttaacctgga

SEQ ID NO: 266 - RNA, 21 nt, synthetic construct
  misc_feature 1..21: note = Synthetic
  source 1..21: mol_type = other RNA
gggacagagcctgggagacgc

SEQ ID NO: 267 - RNA, 21 nt, synthetic construct
  misc_feature 1..21: note = Synthetic
  source 1..21: mol_type = other RNA
catatggagattgtgggcact

SEQ ID NO: 268 - RNA, 21 nt, synthetic construct
  misc_feature 1..21: note = Synthetic
  source 1..21: mol_type = other RNA
acaagagattatcggcaaggg

SEQ ID NO: 269 - DNA, 6045 bp, Homo sapiens
  source 1..6045: mol_type = genomic DNA
acagtgccaataccatgaagaggagctcagacagctcttaccacatgatacaagagccggctggtggaagagtggggaccagaaagagaatttgctgaagaggagaaggaaaaaaaaaacaccaaaaaaaaaaataaaaaaatccacacacacaaaaaaacctgcgcgtgaggggggaggaaaagcagggccttttaaaaaggcaatcacaacaacttttgctgccaggatgcccttgctttggctgagaggatttctgttggcaagttgctggattatagtgaggagttcccccaccccaggatccgaggggcacagcgcggcccccgactgtccgtcctgtgcgctggccgccctcccaaaggatgtacccaactctcagccagagatggtggaggccgtcaagaagcacattttaaacatgctgcacttgaagaagagacccgatgtcacccagccggtacccaaggcggcgcttctgaacgcgatcagaaagcttcatgtgggcaaagtcggggagaacgggtatgtggagatagaggatgacattggaaggagggcagaaatgaatgaacttatggagcagacctcggagatcatcacgtttgccgagtcaggaacagccaggaagacgctgcacttcgagatttccaaggaaggcagtgacctgtcagtggtggagcgtgcagaagtctggctcttcctaaaagtccccaaggccaacaggaccaggaccaaagtcaccatccgcctcttccagcagcagaagcacccgcagggcagcttggacacaggggaagaggccgaggaagtgggcttaaagggggagaggagtgaactgttgctctctgaaaaagtagtagacgctcggaagagcacctggcatgtcttccctgtctccagcagcatccagcggttgctggaccagggcaagagctccctggacgttcggattgcctgtgagcagtgccaggagagtggcgccagcttggttctcctgggcaagaagaagaagaaagaagaggagggggaagggaaaaagaagggcggaggtgaaggtggggcaggagcagatgaggaaaaggagcagtcgcacagacctttcctcatgctgcaggcccggcagtctgaagaccaccctcatcgccggcgtcggcggggcttggagtgtgatggcaaggtcaacatctgctgtaagaaacagttctttgtcagtttcaaggacatcggctggaatgactggatcattgctccctctggctatcatgccaactactgcgagggtgagtgcccgagccatatagcaggcacgtccgggtcctcactgtccttccactcaacagtcatcaaccactaccgcatgcggggccatagcccctttgccaacctcaaatcgtgctgtgtgcccaccaagctgagacccatgtccatgttgtactatgatgatggtcaaaacatcatcaaaaaggacattcagaacatgatcgtggaggagtgtgggtgctcatagagttgcccagcccagggggaaagggagcaagagttgtccagagaagacagtggcaaaatgaagaaatttttaaggtttctgagttaaccagaaaaatagaaattaaaaacaaaacaaaaaaaaaaacaaaaaaaaacaaaagtaaattaaaaacaaaacctgatgaacagatgaaggaagatgtggaaaaaatccttagccagggctcagagatgaagcagtgaaagagacaggaattgggagggaaagggagaatggtgtaccctttatttcttctgaaatcacactgatgacatcagttgtttaaacggggtattgtcctttccccccttgaggttcccttgtgagccttgaatcaaccaatctagtctgcagtagtgtggactagaacaacccaaatagcatctagaaagccatgagtttgaaagggcccatcacaggcactttcctacccaattacccaggtcataaggtatgtctgtgtgacacttatctctgtgtatatcagcatacacacacacacacacacacacacacacacacacaggcatttccacacattacatatatacacatactggtaaaagaacaatcgtgtgcaggtggtcacacttcctttttctgtaccacttttgcaacaaaacaaaacaaacaacattaaaaaattgagaacaagtatggaaagaatgaaagatcaaggaaaaaagaataccaagttacatttcgttaaggtgcttatgatcttagaactatgcaacctaataggtttgaaactgtttacctgagagagaacaaaaagagagacttttttgtattggaagtaatctgattaatttttattttcttcaaggagagatacttgaaaggaatatgtttgtccatctgttggatccaaacatttctatattttgtaaatgttgttgttgttttttttttaatcgtttactatttgcactacaatggtgtttgacctgtctaatccttatttaacaagtattttctttggttgggggtgggggtggggtttaagagctgcacttaatgtgagctataaaagaactgctacagcacacaaaatagctatttttattattataattataattattattattattttgtaccttaaaaaatagacacatacaccaaagacatttgtgtgagcctttaaacagtctgtctgtggttggtatcattcaccatcaatgagtcaggggttgggattcaaggttgagtagtgtggattgtgttcaggcttaaaagacctgagaagtttggtttttgactccttttacatccatgaaacaggacatttcatactggatgtacagtagttgtacactgttggatatcaagttcaatcaaattcatggaactacatgcttgtatgtgtatatatacattgcttgtgcatatgcatatctgtatgtatatatacatgtattgtaccatgtccatacacattttaagcacttcaggctgtcattttttaatgttcttaaagcaatgaatgtttgtgtgcaaaacacagtatttttaagaaggataggctatagtttttgcttttactctgaactaggtgggcgcatttcaaaaattcggatgggaaaaagcctggaaattccagtgaatattcagcaaggccctctttcattgtacagggatcaaatttcctcctcttttttgtgccccctcccacttctacaagttatcccctgtggggaaaacaggatgataatcaaaactctgggctgatgtttttccaacttagtgtctattggaatcaatcttaaatcagaagctttttcagaaaaataatatttaggccagaattagagttgagtgtattttttaaaaatgattaaggcttggttgtgagaaatattacctgtaccagctgggaaaaataatgtcatcactaactaaaagataattaatttgagagaaagtgttaagagagggagagtaaggaagagaacagttaagaggaggcagaggtgagggcagtagtaaaaatctctaaaattttaatttacagccaaaattcttcatgtgtaaatttgtattgattcagatgcagaaatgaaaaaaaaacacctttgttttataaatatcaaagtacatgcttaaagccaagtttttatctagtttattctagtacttagcttgcctggaatagctaataaattattcatgtatgtgcttttgaaaatccagagccctatttttacacacttgtgtgaagttggcaaacattttgaaaaatggaaaaaagtttctaataattgggaacaattacattaattaatattttgtaaaatattgaagcttttagccctatgtcaatttgtagattaaaataaattaattataggaaaggaagataacagtgagaaaccaaacattacaaaaggtggtttagctctccttgaaaaatatactaagttggtatactataacacttggctatatgtaggcaatgtcactactgggcaaatacacttactgtgttctagaggcagccctttcttatgcagaaaatacaatacgcactgcatgagaagcttgagagtggattctaatccaggtctgtcgaccttggatatcatgcatgtgggaaggtgggtgtggtgagaaaagttttaaggcaagagtagatggccatgttcaactttacaaaatttcttggaaaactggcagtattttgaactgcatcttctttggtaccggaacctgcagaaacagtgtgagaaattaagtcctggttcactgcgcagtagcaaagatggtcaaggccatggaaaaagcagaaatttaccaagaaagctgatacccatgtatagttcccactcatctcaaatacatctgctatctttttaagctaagtcctagacatatcggggataacatgggggttgattagtgaccacagttatcagaagcagagaaatgtaattccatattttatttgaaacttattccatattttaattggatattgagtgattgggttatcaaacacccacaaactttaattttgttaaatttatatggctttgaaatagaagtataagttgctaccattttttgataacattgaaagatagtattttaccatctttaatcatcttggaaaatacaagtcctgtgaacaaccactctttcacctagcagcatgaggccaaaagtaaaggctttaaattataacatatgggattcttagtagtatgtttttttcttgaaactcagtggctctatctaaccttactatctcctcactctttctctaagactaaactctaggctcttaaaaatctgcccacaccaatcttagaagctctgaaaagaatttgtctttaaatatcttttaatagtaacatgtattttatggaccaaattgacattttcgactattttttccaaaaaagtcaggtgaatttcagcacactgagttgggaatttcttatcccagaagaccaaccaatttcatatttatttaagattgattccatactccgttttcaaggagaatccctgcagtctccttaaaggtagaacaaatactttctatttttttttcaccattgtgggattggactttaagaggtgactctaaaaaaacagagaacaaatatgtctcagttgtattaagcacggacccatattatcatattcacttaaaaaaatgatttcctgtgcaccttttggcaacttctcttttcaatgtagggaaaaacttagtcaccctgaaaacccacaaaataaataaaacttgtagatgtgggcagaaggtttgggggtggacattgtatgtgtttaaattaaaccctgtatcactgagaagctgttgtatgggtcagagaaaatgaatgcttagaagctgttcacatcttcaagagcagaagcaaaccacatgtctcagctatattattatttattttttatgcataaagtgaatcatttcttctgtattaatttccaaagggttttaccctctatttaaatgctttgaaaaacagtgcattgacaatgggttgatatttttctttaaaagaaaaatataattatgaaagccaagataatctgaagcctgttttattttaaaactttttatgttctgtggttgatgttgtttgtttgtttgtttctattttgttggttttttactttgttttttgttttgttttgttttgttttgcatactacatgcagttctttaaccaatgtctgtttggctaatgtaattaaagttgttaatttatatgagtgcatttcaactatgtcaatggtttcttaatatttattgtgtagaagtactggtaatttttttatttacaatatgtttaaagagataacagtttgatatgttttcatgtgtttatagcagaagttatttatttctatggcattccagcggatattttggtgtttgcgaggcatgcagtcaatattttgtacagttagtggacagtattcagcaacgcctgatagcttctttggccttatgttaaataaaaagacctgtttgggatgta

SEQ ID NO: 270 - DNA, 6403 bp, Mus musculus
  source 1..6403: mol_type = genomic DNA
ggggttcgctagtggctgctcctccaggcagcaccgggccagcgtggagttggagctttgtgaagtagccagtaaatcagaacgcctccgctaggtgcagagcgcggtggcagcgggccactctgccagtgcggtagtcggtgggaccgaactctacactcgggaaggggcagtctgcgggtgcggggcctgagctgccgctcgcctccgttggccaggagaccggcagccccactgcagctgccaaaagggggggaaaaatcaagagctgcgcttttaaacgaagttgcccttgctggtgttcagggtaaaaatagaggcggccgcttggaccagcttggcccctgagtccaggcgtcccgcgagccgggctggagctgcgcattcgggagtgatccctggaaactgccagcaggtgctgctcaagtgccaataccatgaagaggaattcagacagctctgacctcatgagacaagagccggctgacaaaacagaagggacccgaaagagaatttgctgaagaggagaaggaaaaaaaaagtccaaaaaaacctgtgcgtgaggggtggggaggaaaagcagggcctttaaagaaggcaaccacacgacttttgctgccaggatgcccttgctttggctgagaggatttctgttggcaagttgctggattatagtgaggagttcccccaccccaggatccgaggggcacggctcagccccggactgcccgtcctgtgcgctggccacccttccgaaggatggacctaactctcagccagagatggtagaggctgtcaagaagcacatcttaaacatgctgcacttgaagaagagacccgatgtcacccagccggtgcccaaggcggcgcttctcaacgcgatcagaaagcttcatgtgggtaaagtgggggagaacgggtatgtggagatagaggacgacattggcaggagggccgaaatgaatgaactcatggagcagacctcggagatcatcacctttgccgagtcaggcacagccaggaagacactgcactttgagatttccaaggaaggcagtgacctgtcagtagtggagcgtgcagaagtgtggctcttcctgaaagtccccaaggctaacagaaccaggaccaaagtcaccatccgtctatttcagcagcagaagcacccacagggcagcttggacacgggggatgaggccgaggaaatgggcttaaagggggagaggagtgaactgttgctatcagagaaagtagttgatgctcggaagagtacctggcacatctttccagtgtccagcagcatccagcgcctgctggaccagggaaagagttccctggacgtgcggattgcttgtgagcagtgccaggagagtggtgccagtctagtgcttctgggcaagaagaagaagaaagaggtggatggagatgggaagaagaaagatgggagtgacggagggctggaagaggaaaaggaacagtcacatagacctttcctcatgctgcaggctaggcagtccgaagaccaccctcatcgcaggcgtaggcggggcttggagtgcgacggcaaggtcaacatttgctgtaagaaacagttctttgtcagcttcaaggacattggctggaatgactggatcattgctccctctggctatcacgccaattattgtgagggggagtgcccaagccacatagcaggcacctctgggtcctcgctctccttccactcaacagtcattaaccactaccgcatgaggggtcacagcccctttgccaaccttaagtcatgctgtgtgcccaccaagctgagacccatgtccatgctgtattacgatgatggtcaaaacatcatcaaaaaggacattcaaaacatgattgtggaggagtgtggctgctcctagagtcgccaggtcccagagaaaatggatctagagagtccagagaagacagtggcaaaatgaagaaaaaaatataagatttatgaactaaacaaaacaaccagaaaaatagaaataataataataaaaaacccacaaaaaaaaaacaaaaacaaaaatcaaaaactaaactgaaaacaagacctaatgaaacagatgaaggaagatgtggaaaaatatcctaaggcagggctcagagatgaagcagtaaaggagacagggattggggggggggaggggggagaagagagaatggtgtaccttcatttcttccaaaaccaaactgattgcatcagttttatccaaactgggtattgtcctctctcctgcctcttgcggttcccttgcgagcctggaagtctacttgtctattctgcagtaatgtgggttagcacaacccaaataataatgtctagaaagccatgagttttaaagggccagtcccacccacttacccaggttataagtatgtctatgtgacactatctctgtgtatttcaacacacacacacacacacacacactcacacacacacacacacacacacacacacacacacacgcccccccacacacacacacactcacacacacacacacacacacacacacacacacacacacactcacacacacacacacacacacacacgcccacacacacaaacacagaggtgtttccacacaccacatgcatacacatactggtaaaagaacaattctgtgcaggtggtcacattttcttttctgtaccacttttgccaccagacaaaaccaacataaaacattgagaacaagagtggaaagaatgaaagaccaagggaagaagaataccaagttacatttcgttaaggtgcttttgatcctagaactatgcaacctaataggtttgaaactgtttacctgaaagaggacaaaaagagagacttttttgtattggaagtaacctgattaatttttattttcttcaaggagagatacttgaaaggaatatgtttgtccatctgttggattcaaacatttctatattttgtaaatgttgttttttttatcgtttactatttgcactacgatggtgtttgacctgtctaatccttatttaacaagtattttctttgggtgggggtgggggtggggtttaagagctgcacttcatgtgagctataaaagaactgctacagcacacaaaatagctatttttattattataattataattattattattattttgtaccttaaaaatagacacatacaccaaagacatttgtgtgagcctttaaacagtctgtctgtggttggtattgttcaccatcaatgagtcaggggtacagatttaaggttgagttaggtagattgtgttcaggcttaaaagacctgagaggtttgggttttgactcttttacatccatgaaacaggacatttcatactggatgtacagtagtgtacactgttggattatcaagttcaaattcatgagactacatgcttgtatgtgtatatatacattgcttgtgcatatgcatatctgtatgtatatatacatgtattgtaccatgtccatacacattttaagcacttcaggctgtcattttaaaaatgttcttaaaacaatgaatgtttgtgtgcaaaacacagtatttttaagaaggataagtgatagatttttttttttcttgcttttactctgtagtacgtgggtacatttcaaatgttaggatggggaaagactgaaaatcccagtgagtatccagccaggccctctttaaatgtacaggatgaaatcccctctttcatatcccccctgctccctacaagttatcccctgtggggaaaaatgggatgttactttaaaaacaaaatgggctgattttttcaacttatatttattatttattggaatcaatcttaaatcagaaacatttttggaaaaaatctttaggctagaataattttttgaatagtgttattactacttaaataataaaataagcaggaaagtatttaagacagtgagagttaagggagagagcactcaggagccagggagttgtacaaatctctaatattctattttgcagccaaaaaacttgctgtgtatgtttgtactttttcagaggcaaaactgaaaagattgtcttacgaatatcaaaatacacacttaacccaagttcctaatttaacccagtgttggcttgtctaaaacagctaatcagttattcatttacatatttaaaatatagagccttatttttacggacttgtttgaagtttgaaaaactttataaaagtgaaaaactctaattgaaaaaaaatctatattcctcagtattttgtaaaatattgaagcttttagcattaagtcagtccatagattaaagtcattgtaggaaaatgaaatacaaaggagaaattaaatcttaaaaaagctggtttaactcttaaaaaaataaactaactcaatatgtattaaatataccgtcaatataccttatcacattaggctgtgtgtaggcaaactactttagtcttgttactgggcaaacatatttactgtgttccaggggccctccctgtcttatgcaggaaatgcatgtactgcataagaaatgaattataattaaggtctaatgaccttgaagatctcgcatgcgaggacagatggcatgttgaggacacagaggtgaggtggatgtccaggttcagctttgccaatttttgtgaaaaacctttagcgccctctgaactgtttctttagtattggagctaatgccgaggcctagagaaatagtgggcaagagatctaactgtgccatatcagagatgatctagaccatgggaagagcaggatttatgtaactactaattatagttctcattcatctgagatgaatctgcaatcttcttaagccctttaaattctagatgttttgagggtaagcttgggtttaattagtagccatagtaattaaatctagaaagaaatgaaattccacaggacagtgtatttactggagaccaagtgacttggttgtcacataaacctcatcagaactcatcaaatttgtatggccttgcaatagaatttaaattgctaatattttaacaatattagatattgttaacaatttagaaaacatgaagtcttgtgaactggtctttctacataagtgcttaatccaaaatttgaaaagcctttaatgcttaagatcttagtttcttcatggtgtgctttccctagtgttaaagtggctctgtctggtctccccactttctctaggataattcttaaatacctgcccacacaagttctagatgctctgaagagcatttgtagttagtatctctttaatacttgtaagcttcattgacacttttccttcccaaaataagtcaaatttcagcacagcaatggggattttcttatcttagaagaccagccaattctatgttcatttaagattgattccacactccattttcaaggagaggccttgtgttttcttaaaaggcagaataagtaaaattgggagctatgccagactgaacgcaagacgtgactttgtgattccagaacaaacatgcctcagttatagtaacatgcattcaaatgattgtgtcacttgaaaaatatgatttcctgtgggccttttggcaacttctctttttagtatcgagaaaaatgtaatcaccccaaaacccgcataagtgtgacttgtagatgtgggcaggaggttgggggatggacattgtatgtgtttaaattaaaccctgtatcactgagaagctattggaggggtcagagataatgaatgcatagatgctgttcacatcttcaagagcaaaagcaaatcacgtgtctcagctatattattatttatttttatgcataaagtgaatcatttcttctgtattaattttcagtggggtttgccctctatttaaatgctttgaaaaacagtgcattgacaatggttgatatttttctttaaaagaaaaatataattatgaaagccaagataatctgaaatctgttttgatctaaaactttttatgttatgtggttgatgttgtttgtttgttttttatttttattttgtgagttcctttgcatactacatgcaattctttaaccaatgtctggctaatgtaattaaagttgttaatttatatgagtgcatttcaactatgtcaatggtttcttaatatttattttgtagaagtgctggtaattttttatttacgatatgtttaaagagataacggttggatatgttttcatgtgtttatagcagaagttatttatttctattccattccagcggatattctgatgtttgcgaggcatgcagtcaatactttgtacagttagtaggcagtattcagcaatgcccgatagcttctttggccttatgttaaataaaaagacctgtttgggatgtaaaaaaaaaaaaaaaaaaaaaaaaaa

SEQ ID NO: 271 - DNA, 19 bp, synthetic construct
  misc_feature 1..19: note = Synthetic
  source 1..19: mol_type = other DNA
aggatgcccttgctttggc

SEQ ID NO: 272 - DNA, 19 bp, synthetic construct
  misc_feature 1..19: note = Synthetic
  source 1..19: mol_type = other DNA
ggatgcccttgctttggct

SEQ ID NO: 273 - DNA, 19 bp, synthetic construct
  misc_feature 1..19: note = Synthetic
  source 1..19: mol_type = other DNA
tgctttggctgagaggatt

SEQ ID NO: 274 - DNA, 19 bp, synthetic construct
  misc_feature 1..19: note = Synthetic
  source 1..19: mol_type = other DNA
tgagaggatttctgttggc

SEQ ID NO: 275 - DNA, 19 bp, synthetic construct
  misc_feature 1..19: note = Synthetic
  source 1..19: mol_type = other DNA
aggatttctgttggcaagt

SEQ ID NO: 276 - DNA, 19 bp, synthetic construct
  misc_feature 1..19: note = Synthetic
  source 1..19: mol_type = other DNA
gatttctgttggcaagttg

SEQ ID NO: 277 - DNA, 19 bp, synthetic construct
  misc_feature 1..19: note = Synthetic
  source 1..19: mol_type = other DNA
ttggcaagttgctggatta

SEQ ID NO: 278 - DNA, 19 bp, synthetic construct
  misc_feature 1..19: note = Synthetic
  source 1..19: mol_type = other DNA
tggcaagttgctggattat

SEQ ID NO: 279 - DNA, 19 bp, synthetic construct
  misc_feature 1..19: note = Synthetic
  source 1..19: mol_type = other DNA
ggcaagttgctggattata

SEQ ID NO: 280 - DNA, 19 bp, synthetic construct
  misc_feature 1..19: note = Synthetic
  source 1..19: mol_type = other DNA
caagttgctggattatagt

SEQ ID NO: 281 - DNA, 19 bp, synthetic construct
  misc_feature 1..19: note = Synthetic
  source 1..19: mol_type = other DNA
gttgctggattatagtgag

SEQ ID NO: 282 - DNA, 19 bp, synthetic construct
  misc_feature 1..19: note = Synthetic
  source 1..19: mol_type = other DNA
tggattatagtgaggagtt

SEQ ID NO: 283 - DNA, 19 bp, synthetic construct
  misc_feature 1..19: note = Synthetic
  source 1..19: mol_type = other DNA
ggattatagtgaggagttc

SEQ ID NO: 284 - DNA, 19 bp, synthetic construct
  misc_feature 1..19: note = Synthetic
  source 1..19: mol_type = other DNA
tcagaaagcttcatgtggg

SEQ ID NO: 285 - DNA, 19 bp, synthetic construct
  misc_feature 1..19: note = Synthetic
  source 1..19: mol_type = other DNA
aacgggtatgtggagatag

SEQ ID NO: 286 - DNA, 19 bp, synthetic construct
  misc_feature 1..19: note = Synthetic
  source 1..19: mol_type = other DNA
acgggtatgtggagataga

SEQ ID NO: 287 - DNA, 19 bp, synthetic construct
  misc_feature 1..19: note = Synthetic
  source 1..19: mol_type = other DNA
cgggtatgtggagatagag

SEQ ID NO: 288 - DNA, 19 bp, synthetic construct
  misc_feature 1..19: note = Synthetic
  source 1..19: mol_type = other DNA
ggtatgtggagatagagga

SEQ ID NO: 289 - DNA, 19 bp, synthetic construct
  misc_feature 1..19: note = Synthetic
  source 1..19: mol_type = other DNA
agcagacctcggagatcat

SEQ ID NO: 290 - DNA, 19 bp, synthetic construct
  misc_feature 1..19: note = Synthetic
  source 1..19: mol_type = other DNA
accaggaccaaagtcacca

SEQ ID NO: 291 - DNA, 19 bp, synthetic construct
  misc_feature 1..19: note = Synthetic
  source 1..19: mol_type = other DNA
gctgtaagaaacagttctt

SEQ ID NO: 292 - DNA, 19 bp, synthetic construct
  misc_feature 1..19: note = Synthetic
  source 1..19: mol_type = other DNA
ctggaatgactggatcatt

SEQ ID NO: 293 - DNA, 19 bp, synthetic construct
  misc_feature 1..19: note = Synthetic
  source 1..19: mol_type = other DNA
tccttccactcaacagtca

SEQ ID NO: 294 - DNA, 19 bp, synthetic construct
  misc_feature 1..19: note = Synthetic
  source 1..19: mol_type = other DNA
ccaccaagctgagacccat

SEQ ID NO: 295 - RNA, 21 nt, synthetic construct
  misc_feature 1..21: note = Synthetic
  source 1..21: mol_type = other RNA
ccaggatgcccttgctttggc

SEQ ID NO: 296 - RNA, 21 nt, synthetic construct
  misc_feature 1..21: note = Synthetic
  source 1..21: mol_type = other RNA
caggatgcccttgctttggct

SEQ ID NO: 297 - RNA, 21 nt, synthetic construct
  misc_feature 1..21: note = Synthetic
  source 1..21: mol_type = other RNA
cttgctttggctgagaggatt

SEQ ID NO: 298 - RNA, 21 nt, synthetic construct
  misc_feature 1..21: note = Synthetic
  source 1..21: mol_type = other RNA
gctgagaggatttctgttggc

SEQ ID NO: 299 - RNA, 21 nt, synthetic construct
  misc_feature 1..21: note = Synthetic
  source 1..21: mol_type = other RNA
agaggatttctgttggcaagt

SEQ ID NO: 300 - RNA, 21 nt, synthetic construct
  misc_feature 1..21: note = Synthetic
  source 1..21: mol_type = other RNA
aggatttctgttggcaagttg

SEQ ID NO: 301 - RNA, 21 nt, synthetic construct
  misc_feature 1..21: note = Synthetic
  source 1..21: mol_type = other RNA
tgttggcaagttgctggatta

SEQ ID NO: 302 - RNA, 21 nt, synthetic construct
  misc_feature 1..21: note = Synthetic
  source 1..21: mol_type = other RNA
gttggcaagttgctggattat

SEQ ID NO: 303 - RNA, 21 nt, synthetic construct
  misc_feature 1..21: note = Synthetic
  source 1..21: mol_type = other RNA
ttggcaagttgctggattata

SEQ ID NO: 304 - RNA, 21 nt, synthetic construct
  misc_feature 1..21: note = Synthetic
  source 1..21: mol_type = other RNA
ggcaagttgctggattatagt

SEQ ID NO: 305 - RNA, 21 nt, synthetic construct
  misc_feature 1..21: note = Synthetic
  source 1..21: mol_type = other RNA
aagttgctggattatagtgag

SEQ ID NO: 306 - RNA, 21 nt, synthetic construct
  misc_feature 1..21: note = Synthetic
  source 1..21: mol_type = other RNA
gctggattatagtgaggagtt

SEQ ID NO: 307 - RNA, 21 nt, synthetic construct
  misc_feature 1..21: note = Synthetic
  source 1..21: mol_type = other RNA
ctggattatagtgaggagttc

SEQ ID NO: 308 - RNA, 21 nt, synthetic construct
  misc_feature 1..21: note = Synthetic
  source 1..21: mol_type = other RNA
gatcagaaagcttcatgtggg

SEQ ID NO: 309 - RNA, 21 nt, synthetic construct
  misc_feature 1..21: note = Synthetic
  source 1..21: mol_type = other RNA
agaacgggtatgtggagatag

SEQ ID NO: 310 - RNA, 21 nt, synthetic construct
  misc_feature 1..21: note = Synthetic
  source 1..21: mol_type = other RNA
gaacgggtatgtggagataga

SEQ ID NO: 311 - RNA, 21 nt, synthetic construct
  misc_feature 1..21: note = Synthetic
  source 1..21: mol_type = other RNA
aacgggtatgtggagatagag

SEQ ID NO: 312 - RNA, 21 nt, synthetic construct
  misc_feature 1..21: note = Synthetic
  source 1..21: mol_type = other RNA
cgggtatgtggagatagagga

SEQ ID NO: 313 - RNA, 21 nt, synthetic construct
  misc_feature 1..21: note = Synthetic
  source 1..21: mol_type = other RNA
ggagcagacctcggagatcat

SEQ ID NO: 314 - RNA, 21 nt, synthetic construct
  misc_feature 1..21: note = Synthetic
  source 1..21: mol_type = other RNA
ggaccaggaccaaagtcacca

SEQ ID NO: 315 - RNA, 21 nt, synthetic construct
  misc_feature 1..21: note = Synthetic
  source 1..21: mol_type = other RNA
ctgctgtaagaaacagttctt

SEQ ID NO: 316 - RNA, 21 nt, synthetic construct
  misc_feature 1..21: note = Synthetic
  source 1..21: mol_type = other RNA
ggctggaatgactggatcatt

SEQ ID NO: 317 - RNA, 21 nt, synthetic construct
  misc_feature 1..21: note = Synthetic
  source 1..21: mol_type = other RNA
tgtccttccactcaacagtca

SEQ ID NO: 318 - RNA, 21 nt, synthetic construct
  misc_feature 1..21: note = Synthetic
  source 1..21: mol_type = other RNA
gcccaccaagctgagacccat

SEQ ID NO: 319 - RNA, 23 nt, synthetic construct
  misc_feature 1..23: note = Synthetic
  source 1..23: mol_type = other RNA
gccaaagcaagggcatcctggca

SEQ ID NO: 320 - RNA, 23 nt, synthetic construct
  misc_feature 1..23: note = Synthetic
  source 1..23: mol_type = other RNA
agccaaagcaagggcatcctggc

SEQ ID NO: 321 - RNA, 23 nt, synthetic construct
  misc_feature 1..23: note = Synthetic
  source 1..23: mol_type = other RNA
aatcctctcagccaaagcaaggg

SEQ ID NO: 322 - RNA, 23 nt, synthetic construct
  misc_feature 1..23: note = Synthetic
  source 1..23: mol_type = other RNA
gccaacagaaatcctctcagcca

SEQ ID NO: 323 - RNA, 23 nt, synthetic construct
  misc_feature 1..23: note = Synthetic
  source 1..23: mol_type = other RNA
acttgccaacagaaatcctctca

SEQ ID NO: 324 - RNA, 23 nt, synthetic construct
  misc_feature 1..23: note = Synthetic
  source 1..23: mol_type = other RNA
caacttgccaacagaaatcctct

SEQ ID NO: 325 - RNA, 23 nt, synthetic construct
  misc_feature 1..23: note = Synthetic
  source 1..23: mol_type = other RNA
taatccagcaacttgccaacaga

SEQ ID NO: 326 - RNA, 23 nt, synthetic construct
  misc_feature 1..23: note = Synthetic
  source 1..23: mol_type = other RNA
ataatccagcaacttgccaacag

SEQ ID NO: 327 - RNA, 23 nt, synthetic construct
  misc_feature 1..23: note = Synthetic
  source 1..23: mol_type = other RNA
tataatccagcaacttgccaaca

SEQ ID NO: 328 - RNA, 23 nt, synthetic construct
  misc_feature 1..23: note = Synthetic
  source 1..23: mol_type = other RNA
actataatccagcaacttgccaa

SEQ ID NO: 329 - RNA, 23 nt, synthetic construct
  misc_feature 1..23: note = Synthetic
  source 1..23: mol_type = other RNA
ctcactataatccagcaacttgc

SEQ ID NO: 330 - RNA, 23 nt, synthetic construct
  misc_feature 1..23: note = Synthetic
  source 1..23: mol_type = other RNA
aactcctcactataatccagcaa

SEQ ID NO: 331 - RNA, 23 nt, synthetic construct
  misc_feature 1..23: note = Synthetic
  source 1..23: mol_type = other RNA
gaactcctcactataatccagca

SEQ ID NO: 332 - RNA, 23 nt, synthetic construct
  misc_feature 1..23: note = Synthetic
  source 1..23: mol_type = other RNA
cccacatgaagctttctgatcgc

SEQ ID NO: 333 - RNA, 23 nt, synthetic construct
  misc_feature 1..23: note = Synthetic
  source 1..23: mol_type = other RNA
ctatctccacatacccgttctcc

SEQ ID NO: 334 - RNA, 23 nt, synthetic construct
  misc_feature 1..23: note = Synthetic
  source 1..23: mol_type = other RNA
tctatctccacatacccgttctc

SEQ ID NO: 335 - RNA, 23 nt, synthetic construct
  misc_feature 1..23: note = Synthetic
  source 1..23: mol_type = other RNA
ctctatctccacatacccgttct

SEQ ID NO: 336 - RNA, 23 nt, synthetic construct
  misc_feature 1..23: note = Synthetic
  source 1..23: mol_type = other RNA
tcctctatctccacatacccgtt

SEQ ID NO: 337 - RNA, 23 nt, synthetic construct
  misc_feature 1..23: note = Synthetic
  source 1..23: mol_type = other RNA
atgatctccgaggtctgctccat

SEQ ID NO: 338 - RNA, 23 nt, synthetic construct
  misc_feature 1..23: note = Synthetic
  source 1..23: mol_type = other RNA
tggtgactttggtcctggtcctg

SEQ ID NO: 339 - RNA, 23 nt, synthetic construct
  misc_feature 1..23: note = Synthetic
  source 1..23: mol_type = other RNA
aagaactgtttcttacagcagat

SEQ ID NO: 340 - RNA, 23 nt, synthetic construct
  misc_feature 1..23: note = Synthetic
  source 1..23: mol_type = other RNA
aatgatccagtcattccagccga

SEQ ID NO: 341 - RNA, 23 nt, synthetic construct
  misc_feature 1..23: note = Synthetic
  source 1..23: mol_type = other RNA
tgactgttgagtggaaggacagt

SEQ ID NO: 342 - RNA, 23 nt, synthetic construct
  misc_feature 1..23: note = Synthetic
  source 1..23: mol_type = other RNA
atgggtctcagcttggtgggcac

SEQ ID NO: 343 - RNA, 23 nt, synthetic construct
  misc_feature 1..23: note = Synthetic
  source 1..23: mol_type = other RNA
agatcctggagcgtcttgtcttt

SEQ ID NO: 344 - RNA, 23 nt, synthetic construct
  misc_feature 1..23: note = Synthetic
  source 1..23: mol_type = other RNA
aagtctcgatgagcaattccagg

SEQ ID NO: 345 - RNA, 23 nt, synthetic construct
  misc_feature 1..23: note = Synthetic
  source 1..23: mol_type = other RNA
tcataactctgccaccagttggg

SEQ ID NO: 346 - RNA, 23 nt, synthetic construct
  misc_feature 1..23: note = Synthetic
  source 1..23: mol_type = other RNA
ggactcctccagaattgcatctt

SEQ ID NO: 347 - RNA, 23 nt, synthetic construct
  misc_feature 1..23: note = Synthetic
  source 1..23: mol_type = other RNA
ggagcgtcttgtctttggagaga

SEQ ID NO: 348 - RNA, 23 nt, synthetic construct
  misc_feature 1..23: note = Synthetic
  source 1..23: mol_type = other RNA
atggcttcaaagttattatatac

SEQ ID NO: 349 - RNA, 23 nt, synthetic construct
  misc_feature 1..23: note = Synthetic
  source 1..23: mol_type = other RNA
tccagttaaaagttatggcttca

SEQ ID NO: 350 - RNA, 23 nt, synthetic construct
  misc_feature 1..23: note = Synthetic
  source 1..23: mol_type = other RNA
tcttatattaaaacaaaagattt

SEQ ID NO: 351 - RNA, 23 nt, synthetic construct
  misc_feature 1..23: note = Synthetic
  source 1..23: mol_type = other RNA
atcgtagacaagatcctggagcg

SEQ ID NO: 352 - RNA, 23 nt, synthetic construct
  misc_feature 1..23: note = Synthetic
  source 1..23: mol_type = other RNA
taatcaaacagggacccgtgctc

SEQ ID NO: 353 - RNA, 23 nt, synthetic construct
  misc_feature 1..23: note = Synthetic
  source 1..23: mol_type = other RNA
atcccatccagattgaaaatgga

SEQ ID NO: 354 - RNA, 23 nt, synthetic construct
  misc_feature 1..23: note = Synthetic
  source 1..23: mol_type = other RNA
attacaatttatttacatttgca

SEQ ID NO: 355 - RNA, 23 nt, synthetic construct
  misc_feature 1..23: note = Synthetic
  source 1..23: mol_type = other RNA
atgacaaggaaaacaatgatgat

SEQ ID NO: 356 - RNA, 23 nt, synthetic construct
  misc_feature 1..23: note = Synthetic
  source 1..23: mol_type = other RNA
acgtcttcctgcacgctgagctg

SEQ ID NO: 357 - RNA, 23 nt, synthetic construct
  misc_feature 1..23: note = Synthetic
  source 1..23: mol_type = other RNA
tctccacacaattcgctctcaga

SEQ ID NO: 358 - RNA, 23 nt, synthetic construct
  misc_feature 1..23: note = Synthetic
  source 1..23: mol_type = other RNA
atcactcgcaaggcctcataact

SEQ ID NO: 359 - RNA, 23 nt, synthetic construct
  misc_feature 1..23: note = Synthetic
  source 1..23: mol_type = other RNA
cacaatctccatatgcaggtgtg

SEQ ID NO: 360 - RNA, 23 nt, synthetic construct
  misc_feature 1..23: note = Synthetic
  source 1..23: mol_type = other RNA
acacctcggcacatgcgcacttg

SEQ ID NO: 361 - RNA, 23 nt, synthetic construct
  misc_feature 1..23: note = Synthetic
  source 1..23: mol_type = other RNA
gcaatgtctatggtgtcagtgac

SEQ ID NO: 362 - RNA, 23 nt, synthetic construct
  misc_feature 1..23: note = Synthetic
  source 1..23: mol_type = other RNA
agtcaatatagcagcagtgtgtg

SEQ ID NO: 363 - RNA, 23 nt, synthetic construct
  misc_feature 1..23: note = Synthetic
  source 1..23: mol_type = other RNA
tccaggttaaagatggagaccat

SEQ ID NO: 364 - RNA, 23 nt, synthetic construct
  misc_feature 1..23: note = Synthetic
  source 1..23: mol_type = other RNA
gcgtctcccaggctctgtccctc

SEQ ID NO: 365 - RNA, 23 nt, synthetic construct
  misc_feature 1..23: note = Synthetic
  source 1..23: mol_type = other RNA
agtgcccacaatctccatatgca

SEQ ID NO: 366 - RNA, 23 nt, synthetic construct
  misc_feature 1..23: note = Synthetic
  source 1..23: mol_type = other RNA
cccttgccgataatctcttgtaa

SEQ ID NO: 367 - DNA, 4531 bp, Homo sapiens
  source 1..4531: mol_type = genomic DNA
gggcgctgctgggctgcggcggcggcggcggcggcggtggttactatggcggagtcggccggagcctcctccttcttcccccttgttgtcctcctgctcgccggcagcggcgggtccgggccccggggggtccaggctctgctgtgtgcgtgcaccagctgcctccaggccaactacacgtgtgagacagatggggcctgcatggtttccattttcaatctggatgggatggagcaccatgtgcgcacctgcatccccaaagtggagctggtccctgccgggaagcccttctactgcctgagctcggaggacctgcgcaacacccactgctgctacactgactactgcaacaggatcgacttgagggtgcccagtggtcacctcaaggagcctgagcacccgtccatgtggggcccggtggagctggtaggcatcatcgccggcccggtgttcctcctgttcctcatcatcatcattgttttccttgtcattaactatcatcagcgtgtctatcacaaccgccagagactggacatggaagatccctcatgtgagatgtgtctctccaaagacaagacgctccaggatcttgtctacgatctctccacctcagggtctggctcagggttacccctctttgtccagcgcacagtggcccgaaccatcgttttacaagagattattggcaagggtcggtttggggaagtatggcggggccgctggaggggtggtgatgtggctgtgaaaatattctcttctcgtgaagaacggtcttggttcagggaagcagagatataccagacggtcatgctgcgccatgaaaacatccttggatttattgctgctgacaataaagataatggcacctggacacagctgtggcttgtttctgactatcatgagcacgggtccctgtttgattatctgaaccggtacacagtgacaattgaggggatgattaagctggccttgtctgctgctagtgggctggcacacctgcacatggagatcgtgggcacccaagggaagcctggaattgctcatcgagacttaaagtcaaagaacattctggtgaagaaaaatggcatgtgtgccatagcagacctgggcctggctgtccgtcatgatgcagtcactgacaccattgacattgccccgaatcagagggtggggaccaaacgatacatggcccctgaagtacttgatgaaaccattaatatgaaacactttgactcctttaaatgtgctgatatttatgccctcgggcttgtatattgggagattgctcgaagatgcaattctggaggagtccatgaagaatatcagctgccatattacgacttagtgccctctgacccttccattgaggaaatgcgaaaggttgtatgtgatcagaagctgcgtcccaacatccccaactggtggcagagttatgaggcactgcgggtgatggggaagatgatgcgagagtgttggtatgccaacggcgcagcccgcctgacggccctgcgcatcaagaagaccctctcccagctcagcgtgcaggaagacgtgaagatctaactgctccctctctccacacggagctcctggcagcgagaactacgcacagctgccgcgttgagcgtacgatggaggcctacctctcgtttctgcccagccctctgtggccaggagccctggcccgcaagagggacagagcccgggagagactcgctcactcccatgttgggtttgagacagacaccttttctatttacctcctaatggcatggagactctgagagcgaattgtgtggagaactcagtgccacacctcgaactggttgtagtgggaagtcccgcgaaacccggtgcatctggcacgtggccaggagccatgacaggggcgcttgggaggggccggaggaaccgaggtgttgccagtgctaagctgccctgagggtttccttcggggaccagcccacagcacaccaaggtggcccggaagaaccagaagtgcagcccctctcacaggcagctctgagccgcgctttcccctcctccctgggatggacgctgccgggagactgccagtggagacggaatctgccgctttgtctgtccagccgtgtgtgcatgtgccgaggtgcgtcccccgttgtgcctggttcgtgccatgcccttacacgtgcgtgtgagtgtgtgtgtgtgtctgtaggtgcgcacttacctgcttgagctttctgtgcatgtgcaggtcgggggtgtggtcgtcatgctgtccgtgcttgctggtgcctcttttcagtagtgagcagcatctagtttccctggtgcccttccctggaggtctctccctcccccagagcccctcatgccacagtggtactctgtgtctggcaggctactctgcccaccccagcatcagcacagctctcctcctccatctcagactgtggaaccaaagctggcccagttgtccatgacaaaagaggcttttgggccaaaatgtgagggtggtgggtgggatgggcagggaaggaatcctggtggaagtcttgggtgttagtgtcagccatgggaaatgagccagcccaagggcatcatcctcagcagcatcgaggaagggccgaggaatgtgaagccagatctcgggactcagattggaatgttacatctgtctttcatctcccagatcctggaaacagcagtgtatatttttggtggtggtgggtttggggtggggaagggaagggcgggcaaggagtggggagggagtctggggtgggagggaggcatctgcatgggtcttcttttactggactgtctgatcagggtggagggaaggtgagaggtttgcatccacttcaggagccctactgaagggaacagcctgagccgaacatgttatttaacctgagtatagtatttaacgaagcctagaagcacggctgtgggtggtgatttggtcagcatatcttaggtatataataactttgaagccataacttttaactggagtggtttgatttctttttttaattttattgggagggtttggattttaactttttttaatgttgttaaatattaagtttttgtaaaaggaaaaccatctctgtgattacctctcaatctatttgtttttaaagaaatccctaaaaaaaaaaattatccaattgaacgcacatagctcaatcacactggaaatgtttgtccttgcacctgagcctgttcccactcagcagtgagagttcctctttgccctgaggctcagtctctctcgtattttgtccccacccccaattccttgagtggtttttgctctagggccctttcttgcactgtccagctggttgtaccctctccaggcatttattcaacaaatgtgggtgaagtgcctgctgggtgccaggtgctgggaatacatctgtggacaagacatgcttgggtcctactcctggagcactgtaaaaagagctgattcaagtaagtagatgcctgttttgagaccagaaggtttcataattggttctacgacccttttgagcctagaattattgttcttatataagatcactgaagaaagaggaacccccacaaccccctccacaaagagaccaggggcgggtgatgagacctggggtttagaaccccaggtgagacctcaaatcactgcattcattctgagcccccttcctgtccccaggggaggtgtattgtgtatgtagccttagagcatctctgcctccaacccagcagttctctgccaaagcttgtggaggagggagagccctgtccctgccctcaggctccccagtgctcctggcccttctatttatttgactgattattgcttctttccttgcattaaaggagatcttcccctaacctttgggccaatttactggccactaatttcgtttaaataccattgtgtcattggggggaccgtctttacccctgctgacctcccacctatccgccctgcagcagaaccttggcggtttataggtaatgatggaacttagactcctcttcccagagtcacaagtagcctctgggatctgccaacacacgtccactcccaagccactagcccactccccagttggcccttctgcccttaccccacacacagtccaactcttccacctctggggaagatggagcaggtctttgggaagctcccacacccacctctgccactcttaacactaagtgagagttggggagaaactgaagccgtgtttttggccccccgaggctaaccctgatccatagtgctacctgcacctctggattctggattcacagaccaagtccaagcccgttcttacgtcgccataaaggcccccgaacggcattctcggtacttctgtttgtttttgtacattttattagaaaggactgtaaaatagccacttagacactttacctcttcagtatgcaaatgtaaataaattgtaatataggaaatcttttgttttaatataagaatgagcctgtccaatttctgctgtacattattaaaagttttattcacaga

SEQ ID NO: 368 - DNA, 4654 bp, Homo sapiens
  source 1..4654: mol_type = genomic DNA
gggcgctgctgggctgcggcggcggcggcggcggcggtggttactatggcggagtcggccggagcctcctccttcttcccccttgttgtcctcctgctcgccggcagcggcgggtccgggccccggggggtccaggctctgctgtgtgcgtgcaccagctgcctccaggccaactacacgtgtgagacagatggggcctgcatggtttccattttcaatctggatgggatggagcaccatgtgcgcacctgcatccccaaagtggagctggtccctgccgggaagcccttctactgcctgagctcggaggacctgcgcaacacccactgctgctacactgactactgcaacaggatcgacttgagggtgcccagtggtcacctcaaggagcctgagcacccgtccatgtggggcccggtggagctggtaggcatcatcgccggcccggtgttcctcctgttcctcatcatcatcattgttttccttgtcattaactatcatcagcgtgtctatcacaaccgccagagactggacatggaagatccctcatgtgagatgtgtctctccaaagacaagacgctccaggatcttgtctacgatctctccacctcagggtctggctcagggttacccctctttgtccagcgcacagtggcccgaaccatcgttttacaagagattattggcaagggtcggtttggggaagtatggcggggccgctggaggggtggtgatgtggctgtgaaaatattctcttctcgtgaagaacggtcttggttcagggaagcagagatataccagacggtcatgctgcgccatgaaaacatccttggatttattgctgctgacaataaagcagactgctcattcctcacattgccatgggaagttgtaatggtctctgctgcccccaagctgaggagccttagactccaatacaagggaggaaggggaagagcaagatttttattcccactgaataatggcacctggacacagctgtggcttgtttctgactatcatgagcacgggtccctgtttgattatctgaaccggtacacagtgacaattgaggggatgattaagctggccttgtctgctgctagtgggctggcacacctgcacatggagatcgtgggcacccaagggaagcctggaattgctcatcgagacttaaagtcaaagaacattctggtgaagaaaaatggcatgtgtgccatagcagacctgggcctggctgtccgtcatgatgcagtcactgacaccattgacattgccccgaatcagagggtggggaccaaacgatacatggcccctgaagtacttgatgaaaccattaatatgaaacactttgactcctttaaatgtgctgatatttatgccctcgggcttgtatattgggagattgctcgaagatgcaattctggaggagtccatgaagaatatcagctgccatattacgacttagtgccctctgacccttccattgaggaaatgcgaaaggttgtatgtgatcagaagctgcgtcccaacatccccaactggtggcagagttatgaggcactgcgggtgatggggaagatgatgcgagagtgttggtatgccaacggcgcagcccgcctgacggccctgcgcatcaagaagaccctctcccagctcagcgtgcaggaagacgtgaagatctaactgctccctctctccacacggagctcctggcagcgagaactacgcacagctgccgcgttgagcgtacgatggaggcctacctctcgtttctgcccagccctctgtggccaggagccctggcccgcaagagggacagagcccgggagagactcgctcactcccatgttgggtttgagacagacaccttttctatttacctcctaatggcatggagactctgagagcgaattgtgtggagaactcagtgccacacctcgaactggttgtagtgggaagtcccgcgaaacccggtgcatctggcacgtggccaggagccatgacaggggcgcttgggaggggccggaggaaccgaggtgttgccagtgctaagctgccctgagggtttccttcggggaccagcccacagcacaccaaggtggcccggaagaaccagaagtgcagcccctctcacaggcagctctgagccgcgctttcccctcctccctgggatggacgctgccgggagactgccagtggagacggaatctgccgctttgtctgtccagccgtgtgtgcatgtgccgaggtgcgtcccccgttgtgcctggttcgtgccatgcccttacacgtgcgtgtgagtgtgtgtgtgtgtctgtaggtgcgcacttacctgcttgagctttctgtgcatgtgcaggtcgggggtgtggtcgtcatgctgtccgtgcttgctggtgcctcttttcagtagtgagcagcatctagtttccctggtgcccttccctggaggtctctccctcccccagagcccctcatgccacagtggtactctgtgtctggcaggctactctgcccaccccagcatcagcacagctctcctcctccatctcagactgtggaaccaaagctggcccagttgtccatgacaaaagaggcttttgggccaaaatgtgagggtggtgggtgggatgggcagggaaggaatcctggtggaagtcttgggtgttagtgtcagccatgggaaatgagccagcccaagggcatcatcctcagcagcatcgaggaagggccgaggaatgtgaagccagatctcgggactcagattggaatgttacatctgtctttcatctcccagatcctggaaacagcagtgtatatttttggtggtggtgggtttggggtggggaagggaagggcgggcaaggagtggggagggagtctggggtgggagggaggcatctgcatgggtcttcttttactggactgtctgatcagggtggagggaaggtgagaggtttgcatccacttcaggagccctactgaagggaacagcctgagccgaacatgttatttaacctgagtatagtatttaacgaagcctagaagcacggctgtgggtggtgatttggtcagcatatcttaggtatataataactttgaagccataacttttaactggagtggtttgatttctttttttaattttattgggagggtttggattttaactttttttaatgttgttaaatattaagtttttgtaaaaggaaaaccatctctgtgattacctctcaatctatttgtttttaaagaaatccctaaaaaaaaaaattatccaattgaacgcacatagctcaatcacactggaaatgtttgtccttgcacctgagcctgttcccactcagcagtgagagttcctctttgccctgaggctcagtctctctcgtattttgtccccacccccaattccttgagtggtttttgctctagggccctttcttgcactgtccagctggttgtaccctctccaggcatttattcaacaaatgtgggtgaagtgcctgctgggtgccaggtgctgggaatacatctgtggacaagacatgcttgggtcctactcctggagcactgtaaaaagagctgattcaagtaagtagatgcctgttttgagaccagaaggtttcataattggttctacgacccttttgagcctagaattattgttcttatataagatcactgaagaaagaggaacccccacaaccccctccacaaagagaccaggggcgggtgatgagacctggggtttagaaccccaggtgagacctcaaatcactgcattcattctgagcccccttcctgtccccaggggaggtgtattgtgtatgtagccttagagcatctctgcctccaacccagcagttctctgccaaagcttgtggaggagggagagccctgtccctgccctcaggctccccagtgctcctggcccttctatttatttgactgattattgcttctttccttgcattaaaggagatcttcccctaacctttgggccaatttactggccactaatttcgtttaaataccattgtgtcattggggggaccgtctttacccctgctgacctcccacctatccgccctgcagcagaaccttggcggtttataggtaatgatggaacttagactcctcttcccagagtcacaagtagcctctgggatctgccaacacacgtccactcccaagccactagcccactccccagttggcccttctgcccttaccccacacacagtccaactcttccacctctggggaagatggagcaggtctttgggaagctcccacacccacctctgccactcttaacactaagtgagagttggggagaaactgaagccgtgtttttggccccccgaggctaaccctgatccatagtgctacctgcacctctggattctggattcacagaccaagtccaagcccgttcttacgtcgccataaaggcccccgaacggcattctcggtacttctgtttgtttttgtacattttattagaaaggactgtaaaatagccacttagacactttacctcttcagtatgcaaatgtaaataaattgtaatataggaaatcttttgttttaatataagaatgagcctgtccaatttctgctgtacattattaaaagttttattcacaga

SEQ ID NO: 369 - DNA, 4437 bp, Macaca mulatta
  source 1..4437: mol_type = genomic DNA
gagggagggagggagagaggcgccgggggcgcgcgcgcgcgctgggcgctgctgggctgcggcggcggttactatggcggagtcggccggagcctcctccttcttcccccttgttgtcctcctgctcgccggcagcggcgggtccgggccccgggggatccaggctctgctgtgtgcgtgcaccagctgcctacagaccaactacacctgtgagacagatggggcttgcatggtctccatctttaacctggatggcgtggagcaccatgtacgtacctgcatccccaaggtggagctggttcctgctggaaagcccttctactgcctgagttcagaggatctgcgcaacacacactgctgctatattgacttctgcaacaagattgacctcagggtccccagcggacacctcaaggagcctgcgcacccctccatgtggggccctgtggagctggtcggcatcatcgccggccccgtcttcctcctcttccttatcattatcatcgtcttcctggtcatcaactatcaccagcgtgtctaccataaccgccagaggttggacatggaggacccctcttgcgagatgtgtctctccaaagacaagacgctccaggatctcgtctacgacctctccacgtcagggtctggctcagggttacccctttttgtccagcgcacagtggcccgaaccattgttttacaagagattatcggcaagggccggttcggggaagtatggcgtggtcgctggaggggtggtgacgtggctgtgaaaatcttctcttctcgtgaagaacggtcttggttccgtgaagcagagatctaccagaccgtcatgctgcgccatgaaaacatccttggctttattgctgctgacaataaagataatggcacctggacccagctgtggcttgtctctgactatcacgagcatggctcactgtttgattatctgaaccgctacacagtgaccattgagggaatgattaagctagccttgtctgcagccagtggtttggcacacctgcatatggagattgtgggcactcaagggaagccgggaattgctcatcgagacttgaagtcaaagaacatcctggtgaaaaaaaatggcatgtgtgccattgcagacctgggcctggctgtccgtcatgatgcggtcactgacaccatagacattgctccaaatcagagggtggggaccaaacgatacatggctcctgaagtccttgacgagacaatcaacatgaagcactttgactccttcaaatgtgccgacatctatgccctcgggcttgtctactgggagattgcacgaagatgcaattctggaggagtccatgaagactatcaactgccgtattacgacttagtgccctccgacccttccattgaggagatgcgaaaggttgtatgtgaccagaagctacggcccaatgtccccaactggtggcagagttatgaggccttgcgagtgatgggaaagatgatgcgggagtgctggtacgccaatggtgctgcccgtctgacagctctgcgcatcaagaagactctgtcccagctaagcgtgcaggaagatgtgaagatttaagctgttcctctgcctacacaaagaacctgggcagtgaggatgactgcagccaccgtgcaagcgtcgtggaggcctacctcttgtttctgcccggccctctggccagagccctggcctgcaagagggacagagcctgggagacgcgcactcccgttgggtttgagacagacactttttatatttacctcctgatggcatggagactctgagcaaatcatgtagacaactcaatgccacaactcaaactgcttgcagtgggaagtacagagagcccagtgcatctggcgtgttgccaggagcggtgaagggtgctgggctcgcccaggagcggcccccataccttgtggtccactgggctgcaggttttcctccagggaccagtcaactggcatcaagatattgagaggaaccggaagtttcctccctccttcccgtaggcagtcctgagccacaccatcccttctcatggacatccggagggactgcccctagagacacaacctgctgcctgtctgtccagccaagtgcgcatgtgccgaggtgtgtcccacattgtgcctggtctgtgccacgcccgtgtgtgtgtgtgtgtgtgtgagtgagtgtgtgtgtgtacacttaacctgcttgagctttctgtgcatgtgtaggccagggtgtggtggccatactgtctctgagtgctgctgcttctcagtgagcagcatgtagttaacctggtgccctcctaggtgtctcctgtccccagaccccatcagtcagggaggttctgtcttctcagcaggctgcttgcccaccctgtgtcacaggccctcctcttccatttcagaccagaaccaaagctggcccacttgtccatggtaggagaagcttttgggtcaaaatgagggggacttgatgagcagagagagaatgtaggtggaagtcttgggtgctgtgtttcagcatcagccatgggaaatgagccagcccaagggcatcttccttgacagctgtgaggaagggccgaggaatccgaagccagagcttgggactcagattggaatgtaacatctgtttatgtcccaccccagattctgcaaactgcagtgtatatttttggtggtgggtttggggtgggaagggatgggttgcagggcgtggggagggaggctggggtgggagggaggcatctgcatgggcttcttgtactggattctctgatcagggtagagaagaggcaaggcttgcatccacttcagggtccctactgaggagagtgagcggtccgagctgaatatggtgtttaacctaagtttagtatttaatgaattctagaagcctggctgtgggtggtgatttggtcagcatatcttaggtatataataactttgaagccataactttttaactggagtggtttattttaattcagtttattttattttattttggggggagggtcaggattttaactttaatattgttaagttttgtaaaaggagaaccatctctgtgacaattacctcttagtctgtttgtttttaaagaaatccctaaaacaaacaaaacacaaaaattctccagactcaaacgcacatagttcagtcactggaaacgcttgtctttgcacctgagcctgatcccgctgagcagtgagggctgcttttccccatgggggcttgctgtctcgtactccctgcaccctcggccccatcccgtgagcacctcggccctctgcacattgcccggctggttggaccctttccagatacttgctcagcaaatgtgggctgcgagcctgctgagcgctggcccgggaggatctcctcagggtggggcaggcttgggcgctgctctgctcctctaccactggagggaatggaatcatgcgatgggcgagcacctgctgtggagaccagaagtgctcatggctggtcctgagagccttgatgagctaggatcactgttcttaaagaccactgaaactggaagggggacctgtatccccttgggaagagaagcccctggcaagcagtgggtcctggagactgggttcattgtgagcctttcctgccaggggaggcatgagtctttgcagggaaactgtctcctccagcttctcctgccttggtctccccatattcttagcctttctatttatttcctggtgtataactttccttgctttaaagggatcttcctttaattccttgggccaatttactggccattgaacagtgtcccttgagtcccaactgtgtctctggggaacctccttacccacccctgctgacctcccacttcccaccctgcagctgagtatccgtgattacaggcgattgaactgtagagtcctctctgcctctgtacctgccagcagcagcctcacagtgacccccacgccactggacaactcccaggagacctgtgcgctccgtgcagctcagctcagccgcctctcaggaagcctggagcaggtctgggggaccccccccccatcactctttacattaagctgagagttgggagaagctgtgctttggctccctgaggccaccctgatccacggggcacccgcacctctgcgttctggattcacagaccaagtctaaagcccgttcgttcctgagttgccgtcaaggcccctgaacggtactctcggtacttctgtttgttttttgtacaatttattagaaaggactgtaaaatagccacttagacactttacctctccagtatgcaaatgtaaatatattgtaatataggaaatttttgttttaatataagaatgagcctgtccagtttctgctgtacattattaaagttttattcacagaactaaaaaaaaaaaaaaaaaaaaaaaa

SEQ ID NO: 370 - DNA, 2275 bp, Rattus norvegicus
  source 1..2275: mol_type = genomic DNA
ggcggcggttactatggcggagtcggccggagcctcctccttcttcccccttgttgtcctcctgctcgccggcagtggcgggtccgggccccgggggatccaggctctgctgtgtgcatgcaccagctgcctacagaccaactacacctgcgaaacagatggggcctgcatggtctccatctttaacctggatggcatggagcaccacgtacgcacctgcatccccaaggtggagcttgtgcctgctgggaagcccttctactgcctgagttcagaggacctgcgcaacacgcactgctgctatattgacttctgcaacaagattgacctgagggtgcccagtggacacctcaaggagcctgagcacccctccatgtggggccctgtggagctggtcggcatcattgccggtcctgtcttcctcctcttcctcatcatcatcatcgtcttcctggtcatcaactatcatcagcgtgtctaccacaaccgccaaagactggacatggaggacccctcatgtgagatgtgtctctccaaagacaagacgctccaggatctcgtctacgatctctccacttcaggatcgggctcagggttacccctttttgtccagcgcacagtggcccgaaccattgttttacaagagattatcggcaagggccggtttggggaagtatggcgtggccgctggaggggtggtgatgtggctgtgaaaatcttctcttcccgtgaagagcggtcgtggttccgggaggcagagatctaccagactgtcatgctgcgccatgaaaacatccttgggtttattgctgctgacaataaagacaatggcacctggacccagctgtggcttgtctctgactatcacgagcacggctcactgttcgattatctgaaccgctacacagtgaccattgaggggatgattaaactggccctgtctgcagccagtggtttggcacacctgcatatggagattgtgggcactcaggggaagcctggaattgctcatcgagacttgaagtcaaagaacattctggtgaagaagaatggcatgtgtgccattgcagacctgggcctagctgtccgtcacgatgctgtcactgacaccatagacattgctccaaatcagagggtgggaaccaaacgatacatggctcctgaagtacttgacgagaccatcaacatgaagcactttgactccttcaagtgtgccgatatctacgccctcgggcttgtctattgggagattgctcggaggtgcaattctggaggagtccatgaagagtatcaactgccatattatgatttagtgccctctgacccttccattgaggaaatgcgaaaggtcgtctgtgaccagaagctacggcccaatgtccccaactggtggcagagttatgaggccttgcgagtgatggggaagatgatgcgggagtgctggtacgccaatggtgctgcccgcctgacagcgctgcgcatcaagaagactttgtcccagctaagcgtgcaggaagacgtgaagatttaagctgttcctctgcctacgcaaagaacctgggcagtgaggatgcctgcagccaccgtgcaagcgtggaggcctacctcttgtttctgcccagccctctggccagagccctggtctgcaagagggacagagcctgggagacgcacactccctactgggtttgagacagacactttttatatttacctcctgatggcatggagactctgagagcaaatcatgtagatgactcgatgccacaactcgcactgcgtgcagtgggaaggacagaaagcccagtgcatctggcatgttgccaggagtggtgatgggtgctgggctcgcctgggagcagcccccataccgtgttgtccactggactgcaggtttcctccagggaccagtcaactggcagatactgagaggaaccggaagtgtcctcccttttacctgtgggcagtcctgagccacgccatccccttctcatctggaggaccgcccctagagacacaacctgctgcctgtctgtccagccaagtgcgcatgtgccgaggtgtgtctcacattgtgcctggtccgtgcctcgcccgtgtgtgtgtgtgtgtgtgtgtgtatgtgtgtgtgtaggtgtgtgtgagtgtgtgtgttagtgtaggtgtgtgagagtgtgtgtgtaggtgtgtgagtgtgggtgtgtgagagtgtgtgtaggtgtatgtgagtgtgtaagtgtgtgtaggtgtgtgagtgtgtaggtgtgtgagtgtg

SEQ ID NO: 371 - RNA, 11 nt, synthetic construct
  misc_feature 1..11: note = Synthetic
  source 1..11: mol_type = other RNA
tcagcgaattt

SEQ ID NO: 372 - RNA, 11 nt, synthetic construct
  misc_feature 1..11: note = Synthetic
  source 1..11: mol_type = other RNA
taacaataaga

SEQ ID NO: 373 - RNA, 11 nt, synthetic construct
  misc_feature 1..11: note = Synthetic
  source 1..11: mol_type = other RNA
ttaacaacact

SEQ ID NO: 374 - RNA, 11 nt, synthetic construct
  misc_feature 1..11: note = Synthetic
  source 1..11: mol_type = other RNA
agaaagtatca

SEQ ID NO: 375 - protein, 7 aa, synthetic construct
  REGION 1..7: note = Synthetic
ASSLNIA

SEQ ID NO: 376 - protein, 12 aa, synthetic construct
  REGION 1..12: note = Synthetic
SKTFNTHPQSTP

SEQ ID NO: 377 - protein, 12 aa, synthetic construct
  REGION 1..12: note = Synthetic
TARGEHKEEELI

SEQ ID NO: 378 - protein, 9 aa, synthetic construct
  REGION 1..9: note = Synthetic
CQAQGQLVC

SEQ ID NO: 379 - protein, 9 aa, synthetic construct
  REGION 1..9: note = Synthetic
CSERSMNFC

SEQ ID NO: 380 - protein, 9 aa, synthetic construct
  REGION 1..9: note = Synthetic
CPKTRRVPC

SEQ ID NO: 381 - protein, 20 aa, synthetic construct
  REGION 1..20: note = Synthetic
WLSEAGPVVTVRALRGTGSW

SEQ ID NO: 382 - protein, 9 aa, synthetic construct
  REGION 1..9: note = Synthetic
CMQHSMRVC

SEQ ID NO: 383 - protein, 7 aa, synthetic construct
  REGION 1..7: note = Synthetic
DDTRHWG

SEQ ID NO: 384 - protein, 505 aa, synthetic construct
  REGION 1..505: note = Synthetic
MAESARASSFFPLVVLLLAGSGGSGPRGIQALLCACTSCLQANYTCETDGACMVSIFNLDGMEHHVRTCIPKVELVPAGKPFYCLSSEDLRNTHCCYTDYCNRIDLRVPSGHLKEPEHPSMWGPVELVGIIAGPVFLLFLIIIIVFLVINYHQRVYHNRQRLDMEDPSCEMCLSKDKTLQDLVYDLSTSGSGSGLPLFVQRTVARTIVLQEIIGKGRFGEVWRGRWRGGDVAVKIFSSREERSWFREAEIYQTVMLRHENILGFIAADNKDNGTWTQLWLVSDYHEHGSLFDYLNRYTVTIEGMIKLALSAASGLAHLHMEIVGTQGKPGIAHRDLKSKNILVKKNGMCAIADLGLAVRHDAVTDTIDIAPNQRVGTKRYMAPEVLDETINMKHFDSFKCADIYALGLVYWEIARRCNSGGVHEEYQLPYYDLVPSDPSIEEMRKVVCDQKLRPNIPNWWQSYEALRVMGKMMRECWYANGAARLTALRIKKTLSQLSVQEDVKI

SEQ ID NO: 385 - DNA, 21 bp, synthetic construct
  source 1..21: mol_type = other DNA
gagacccgccccgcggtgggc

SEQ ID NO: 386 - DNA, 4516 bp, Homo sapiens
  source 1..4516: mol_type = genomic DNA
aatgcttctcctaagcacctcgtgtgtgttcttcggcctcactgctctgtggcttaggtatctgtgctgtggggtttgagaaacatggtgaaggtgtatgaacagagcttgacatttgtgctctgctgtgtgcgtgcaccagctgcctccaggccaactacacgtgtgagacagatggggcctgcatggtttccattttcaatctggatgggatggagcaccatgtgcgcacctgcatccccaaagtggagctggtccctgccgggaagcccttctactgcctgagctcggaggacctgcgcaacacccactgctgctacactgactactgcaacaggatcgacttgagggtgcccagtggtcacctcaaggagcctgagcacccgtccatgtggggcccggtggagctggtaggcatcatcgccggcccggtgttcctcctgttcctcatcatcatcattgttttccttgtcattaactatcatcagcgtgtctatcacaaccgccagagactggacatggaagatccctcatgtgagatgtgtctctccaaagacaagacgctccaggatcttgtctacgatctctccacctcagggtctggctcagggttacccctctttgtccagcgcacagtggcccgaaccatcgttttacaagagattattggcaagggtcggtttggggaagtatggcggggccgctggaggggtggtgatgtggctgtgaaaatattctcttctcgtgaagaacggtcttggttcagggaagcagagatataccagacggtcatgctgcgccatgaaaacatccttggatttattgctgctgacaataaagataatggcacctggacacagctgtggcttgtttctgactatcatgagcacgggtccctgtttgattatctgaaccggtacacagtgacaattgaggggatgattaagctggccttgtctgctgctagtgggctggcacacctgcacatggagatcgtgggcacccaagggaagcctggaattgctcatcgagacttaaagtcaaagaacattctggtgaagaaaaatggcatgtgtgccatagcagacctgggcctggctgtccgtcatgatgcagtcactgacaccattgacattgccccgaatcagagggtggggaccaaacgatacatggcccctgaagtacttgatgaaaccattaatatgaaacactttgactcctttaaatgtgctgatatttatgccctcgggcttgtatattgggagattgctcgaagatgcaattctggaggagtccatgaagaatatcagctgccatattacgacttagtgccctctgacccttccattgaggaaatgcgaaaggttgtatgtgatcagaagctgcgtcccaacatccccaactggtggcagagttatgaggcactgcgggtgatggggaagatgatgcgagagtgttggtatgccaacggcgcagcccgcctgacggccctgcgcatcaagaagaccctctcccagctcagcgtgcaggaagacgtgaagatctaactgctccctctctccacacggagctcctggcagcgagaactacgcacagctgccgcgttgagcgtacgatggaggcctacctctcgtttctgcccagccctctgtggccaggagccctggcccgcaagagggacagagcccgggagagactcgctcactcccatgttgggtttgagacagacaccttttctatttacctcctaatggcatggagactctgagagcgaattgtgtggagaactcagtgccacacctcgaactggttgtagtgggaagtcccgcgaaacccggtgcatctggcacgtggccaggagccatgacaggggcgcttgggaggggccggaggaaccgaggtgttgccagtgctaagctgccctgagggtttccttcggggaccagcccacagcacaccaaggtggcccggaagaaccagaagtgcagcccctctcacaggcagctctgagccgcgctttcccctcctccctgggatggacgctgccgggagactgccagtggagacggaatctgccgctttgtctgtccagccgtgtgtgcatgtgccgaggtgcgtcccccgttgtgcctggttcgtgccatgcccttacacgtgcgtgtgagtgtgtgtgtgtgtctgtaggtgcgcacttacctgcttgagctttctgtgcatgtgcaggtcgggggtgtggtcgtcatgctgtccgtgcttgctggtgcctcttttcagtagtgagcagcatctagtttccctggtgcccttccctggaggtctctccctcccccagagcccctcatgccacagtggtactctgtgtctggcaggctactctgcccaccccagcatcagcacagctctcctcctccatctcagactgtggaaccaaagctggcccagttgtccatgacaaaagaggcttttgggccaaaatgtgagggtggtgggtgggatgggcagggaaggaatcctggtggaagtcttgggtgttagtgtcagccatgggaaatgagccagcccaagggcatcatcctcagcagcatcgaggaagggccgaggaatgtgaagccagatctcgggactcagattggaatgttacatctgtctttcatctcccagatcctggaaacagcagtgtatatttttggtggtggtgggtttggggtggggaagggaagggcgggcaaggagtggggagggagtctggggtgggagggaggcatctgcatgggtcttcttttactggactgtctgatcagggtggagggaaggtgagaggtttgcatccacttcaggagccctactgaagggaacagcctgagccgaacatgttatttaacctgagtatagtatttaacgaagcctagaagcacggctgtgggtggtgatttggtcagcatatcttaggtatataataactttgaagccataacttttaactggagtggtttgatttctttttttaattttattgggagggtttggattttaactttttttaatgttgttaaatattaagtttttgtaaaaggaaaaccatctctgtgattacctctcaatctatttgtttttaaagaaatccctaaaaaaaaaaattatccaattgaacgcacatagctcaatcacactggaaatgtttgtccttgcacctgagcctgttcccactcagcagtgagagttcctctttgccctgaggctcagtctctctcgtattttgtccccacccccaattccttgagtggtttttgctctagggccctttcttgcactgtccagctggttgtaccctctccaggcatttattcaacaaatgtgggtgaagtgcctgctgggtgccaggtgctgggaatacatctgtggacaagacatgcttgggtcctactcctggagcactgtaaaaagagctgattcaagtaagtagatgcctgttttgagaccagaaggtttcataattggttctacgacccttttgagcctagaattattgttcttatataagatcactgaagaaagaggaacccccacaaccccctccacaaagagaccaggggcgggtgatgagacctggggtttagaaccccaggtgagacctcaaatcactgcattcattctgagcccccttcctgtccccaggggaggtgtattgtgtatgtagccttagagcatctctgcctccaacccagcagttctctgccaaagcttgtggaggagggagagccctgtccctgccctcaggctccccagtgctcctggcccttctatttatttgactgattattgcttctttccttgcattaaaggagatcttcccctaacctttgggccaatttactggccactaatttcgtttaaataccattgtgtcattggggggaccgtctttacccctgctgacctcccacctatccgccctgcagcagaaccttggcggtttataggtaatgatggaacttagactcctcttcccagagtcacaagtagcctctgggatctgccaacacacgtccactcccaagccactagcccactccccagttggcccttctgcccttaccccacacacagtccaactcttccacctctggggaagatggagcaggtctttgggaagctcccacacccacctctgccactcttaacactaagtgagagttggggagaaactgaagccgtgtttttggccccccgaggctaaccctgatccatagtgctacctgcacctctggattctggattcacagaccaagtccaagcccgttcttacgtcgccataaaggcccccgaacggcattctcggtacttctgtttgtttttgtacattttattagaaaggactgtaaaatagccacttagacactttacctcttcagtatgcaaatgtaaataaattgtaatataggaaatcttttgttttaatataagaatgagcctgtccaatttctgctgtacattattaaaagttttattcacagag

SEQ ID NO: 387 - DNA, 4654 bp, Homo sapiens; identical to SEQ ID NO: 368
  source 1..4654: mol_type = genomic DNA

SEQ ID NO: 388 - DNA, 1315 bp, Homo sapiens
  source 1..1315: mol_type = genomic DNA
gctgggcgctgctgggctgcggcggcggcggcggcggcggtggttactatggcggagtcggccggagcctcctccttcttcccccttgttgtcctcctgctcgccggcagcggcgggtccgggccccggggggtccaggctctgctgtgtgcgtgcaccagctgcctccaggccaactacacgtgtgagacagatggggcctgcatggtttccattttcaatctggatgggatggagcaccatgtgcgcacctgcatccccaaagtggagctggtccctgccgggaagcccttctactgcctgagctcggaggacctgcgcaacacccactgctgctacactgactactgcaacaggatcgacttgagggtgcccagtggtcacctcaaggagcctgagcacccgtccatgtggggcccggtggagctggtaggcatcatcgccggcccggtgttcctcctgttcctcatcatcatcattgttttccttgtcattaactatcatcagcgtgtctatcacaaccgccagagactggacatggaagatccctcatgtgagatgtgtctctccaaagacaagacgctccaggatcttgtctacgatctctccacctcagggtctggctcagggttacccctctttgtccagcgcacagtggcccgaaccatcgttttacaagagattattggcaagggtcggtttggggaagtatggcggggccgctggaggggtggtgatgtggctgtgaaaatattctcttctcgtgaagaacggtcttggttcagggaagcagagatataccagacggtcatgctgcgccatgaaaacatccttggatttattgctgctgacaataaagataatggcacctggacacagctgtggcttgtttctgactatcatgagcacgggtccctgtttgattatctgaaccggtacacagtgacaattgaggggatgattaagctggccttgtctgctgctagtgggctggcacacctgcacatggagatcgtgggcacccaagggaagcctggaattgctcatcgagacttaaagtcaaagaacattctggtgaagaaaaatggcatgtgtgccatagcagacctgggcctggctgtccgtcatgatgcagtcactgacaccattgacattgccccgaatcagagggtggggaccaaacggagtccatgaagaatatcagctgccatattacgacttagtgccctctgacccttccattgaggaaatgcgaaaggttgtatgtgatcagaagctgcgtcccaacatccccaactggtggcagagttatgag

SEQ ID NO: 389 - DNA, 1437 bp, Homo sapiens
  source 1..1437: mol_type = genomic DNA
gctgggcgctgctgggctgcggcggcggcggcggcggcggtggttactatggcggagtcggccggagcctcctccttcttcccccttgttgtcctcctgctcgccggcagcggcgggtccgggccccggggggtccaggctctgctgtgtgcgtgcaccagctgcctccaggccaactacacgtgtgagacagatggggcctgcatggtttccattttcaatctggatgggatggagcaccatgtgcgcacctgcatccccaaagtggagctggtccctgccgggaagcccttctactgcctgagctcggaggacctgcgcaacacccactgctgctacactgactactgcaacaggatcgacttgagggtgcccagtggtcacctcaaggagcctgagcacccgtccatgtggggcccggtggagctggtaggcatcatcgccggcccggtgttcctcctgttcctcatcatcatcattgttttccttgtcattaactatcatcagcgtgtctatcacaaccgccagagactggacatggaagatccctcatgtgagatgtgtctctccaaagacaagacgctccaggatcttgtctacgatctctccacctcagggtctggctcagggttacccctctttgtccagcgcacagtggcccgaaccatcgttttacaagagattattggcaagggtcggtttggggaagtatggcggggccgctggaggggtggtgatgtggctgtgaaaatattctcttctcgtgaagaacggtcttggttcagggaagcagagatataccagacggtcatgctgcgccatgaaaacatccttggatttattgctgctgacaataaagcagactgctcattcctcacattgccatgggaagttgtaatggtctctgctgcccccaagctgaggagccttagactccaatacaagggaggaaggggaagagcaagatttttattcccactgaataatggcacctggacacagctgtggcttgtttctgactatcatgagcacgggtccctgtttgattatctgaaccggtacacagtgacaattgaggggatgattaagctggccttgtctgctgctagtgggctggcacacctgcacatggagatcgtgggcacccaagggaagcctggaattgctcatcgagacttaaagtcaaagaacattctggtgaagaaaaatggcatgtgtgccatagcagacctgggcctggctgtccgtcatgatgcagtcactgacaccattgacattgccccgaatcagagggtggggaccaaacggagtccatgaagaatatcagctgccatattacgacttagtgccctctgacccttccattgaggaaatgcgaaaggttgtatgtgatcagaagctgcgtcccaacatccccaactggtggcagagttatga

SEQ ID NO: 390 - DNA, 1631 bp, Homo sapiens
  source 1..1631: mol_type = genomic DNA
gctgggcgctgctgggctgcggcggcggcggcggcggcggtggttactatggcggagtcggccggagcctcctccttcttcccccttgttgtcctcctgctcgccggcagcggcgggtccgggccccggggggtccaggctctgctgtgtgcgtgcaccagctgcctccaggccaactacacgtgtgagacagatggggcctgcatggtttccattttcaatctggatgggatggagcaccatgtgcgcacctgcatccccaaagtggagctggtccctgccgggaagcccttctactgcctgagctcggaggacctgcgcaacacccactgctgctacactgactactgcaacaggatcgacttgagggtgcccagtggtcacctcaaggagcctgagcacccgtccatgtggggcccggtggagctggtaggcatcatcgccggcccggtgttcctcctgttcctcatcatcatcattgttttccttgtcattaactatcatcagcgtgtctatcacaaccgccagagactggacatggaagatccctcatgtgagatgtgtctctccaaagacaagacgctccaggatcttgtctacgatctctccacctcagggtctggctcagggttacccctctttgtccagcgcacagtggcccgaaccatcgttttacaagagattattggcaagggtcggtttggggaagtatggcggggccgctggaggggtggtgatgtggctgtgaaaatattctcttctcgtgaagaacggtcttggttcagggaagcagagatataccagacggtcatgctgcgccatgaaaacatccttggatttattgctgctgacaataaagcagactgctcattcctcacattgccatgggaagttgtaatggtctctgctgcccccaagctgaggagccttagactccaatacaagggaggaaggggaagagcaagatttttattcccactgagatgagatgcctttctgggaatacttggaagtggtctattcatgcactgaaaagcattttttggcctggaatccaataatccataaaggagatctttcctactcacagagatatcatagcctggtaagaacaacagactgaaaagaaacattacagatgagacaggtgctgtgtttgggctgtgttcagagggtcgctgggacacaggaggccctccaaggctttcctgtttggtggtggtagatccagctcattgtggttctcccgtgcagatgagcaagtcttggtcaggatcaaagcagtgctgcacacaaagctggtgatagctgttaccttccccaggcatatgcctcctctttcctgagtacctcacatttcaaatttgacataatgttcagaatcctacagttcacctaaaggaaatcaggagcagtcctaagaaagaaatggtgttcccctgtccttactgaggtcccaaactggtagaccactataaatgaaaggatgctagatggggcttcagggggcatggaggtgggaaatgtgaattcaggagtctaacctgattttgtgttgtatacactcatccttaccaaccttcactgttttgctgatagttacactttttctgggactcatctgtggttct

SEQ ID NO: 391 - DNA, 20545 bp, Macaca fascicularis
  source 1..20545: mol_type = genomic DNA
agaagggggcagttagctggtgcgcgagcgctccctgctcgcctctgtccgcggggagccagtcggcccctccgcaggtcccgctccctgacatttgctgtggtttcagtccctggcagtgagggctgggttcagagattcccagctgcactcactgaacagtgatttttttttcccctccctgaattctttagctgccaaaaggggggaaaaaatcaagagctgctcttaaaagaagttgcccttgctggtgctcagggtaaaaatagaggctgccgcttagaccggcttggccctggctccaggcatcccgcgagctgggctcgagcagcggccgcgttccggcgtgatccctggaagctgccagcaggtgctgctcaaggtacagtagcagggccgagaagccgggacccgaagggcctggggtgcggggaagctccgggggagggggaagtgaaagagaaaccaaaccaaggaaggagaaggagattctggtcaggactgggctgaccagcttgtgccccgggcccttgagttccgcagggaaaagctgattcccagtctagaatattccacagaagctattttaacctgcctgcttcctccaccacccccaccttgatttgcaccgagcgaggaggcattgccactgtggtgcaggtggttgcagaggggttgcagcgcggctggtaggctggtctggcaggtgggcactcggtggcatcagatggccagcggagtttcagagtcacacttgtgttgtggctcctctggtcagagtgctgcagatttctgtgacacccgtgtttaagaagagccaccaggcttctcagaaatagtatcacttattattatctgacggctgcccttgacccccacaggttcatattttggatcccattttatagatgggaacactgaggcctgagtttacacggtgagtgagcagaggaactgggatctgatctgggtttgttttgtgcaccaccgcccccatcacctacacacacacacacacacacacacacacacacaactttgtgtggggggggaggggatgttatcaggacactagggttcatgtgcggggcagaggtgagtttagatgccctgaaggtcattgactccactaattctcagcatgaagggtggagaagttcctttcttataaagggtttctgttcacctagtgctaaactgaggggcaggtttggagttcaccatcattaatcctatttctgtctttgccactcagattcactctcttgctctacaacttaatgatttttttcctacttcatttctgcatatgcagttcttagaatactccttccccccacccccatgcagctcagcacccacactttctctgtatctagccaagagagaccctcttacacagaaaacttctggtgtcctaatggaacctgcttaagccacacatcaggaggccagagcctctatattttgcttgcgggcacagtgaaaagtttattttatgcatgttaaatcctgcatacaaaacaacatatctggtcatatggctctcattagctcccaattttgcacattttatccaacttgtcatgagaactgggcttatgcttcaactatactccttcaaacaacccttcaccattcttgtcagaggacttcttcctcctgtgttatttaccagacttgccaacacctctccccgcccccaaaaagcctgaccagctttacccctgtttcaaggagtgttcacttcttttcattaatctcctgttatatttgtaacaatttagaaattataggagtcgaagttctggtaaaaaaagaatgatgcatgaggatttttgttgttgttgttgttgttgttgttgttgtgtgtgtgtgtgtgtttggttagttaggatggattctaaagacctgggaaggatacttatgaagttcacttaaagagaatgactatttccaaagttcttgatttatgaagcaggcattcaatttcaagatgtaaaataatagtgtaagttggttgcggtggggggagaccatcatcatatgattatacagattttcccaattttttcctcaatgaaatagcttatttaaaaaaaataaaattagaatccatataaagaacactaccaattttctttcctgaaagaaacaataaaatactttgtaaatagaagcaacttcatgaagtaacagatgttttatgtaaagacataaaactgaacctgaatataacgagacgtgtgtgcgagtagtaaaagaaaagttgaaagttggacacactcattgagacatatctatttgattccaatatttttctaaaaggtagagtaatcctggccagaggtttcactggctcagtgcatcacccagtagtgtctcagaagccaggaagggctttccattagataatgaattatgaaatgtctcacactggaaaaaccagtcatctgctgatgtcatgctgattccaaccaatcccaaacaaagccccagccctcctctgtttcagtggtaccaatgtgtggtgtacaaataagtagtacagtataaaacttcacagtgccaataccatgaagaggagctcagacagctcttaccacatgatacaagagccggctggtggaagagtggggaccagaaaggtaatgctttttaactcttacttctgagctctttacacattcaaagataggatagctaggaggaattttacaactaattggcatttccaatgtgcattgtgatgtgtacctttttatattattcaggcaggttaatatagcttttaatagtcctagagcatgcaaatagattatatgtttatacaacccactcagcacatatatacaagtacatatgccaaagagaaagctatttttaagagttacattcgcaaacagtaaattcagggaacacacacgtactcagatgcagagagaatccaaatattgataacttgcagttatctaaatgctgctattaggactcttgagttgtttagagtcattaaacttttggttgtatttcagactttcttgtaaaacttaattggactacaaaatgttttggatactgtatatgtgactccaaataggtggatgatgttaagtattatagtacaaagatgttttataaaaccattataacacaaatgtcccctgcctcccccattctctttcaccatccccgtaaaaaatatgaggctttttaggcaatgttgacaaagtttcaacaataatggtggagtaattgatgtttctggagctgaaaccccaaaggtgttaggttacttgtaacagaaaaagtcttacaaatagttgttttggaaaaggagacagtatatacaattcagagagcattgttaacctgtgaaaactgtaattttaacttagtgtcacaattttcttgccctcttccccttgcactcagatcttatgcttgtagtaatgatatttattaactctttccacctaaactgcattgcttgactataatgctatgaacacactaggtgtcagatataagctgagtgtatcttcagaaaccaagagggcttatgtgtgggaaagaaaccgagagggaaggaacgctttaacagatggaccccttaaagattcttctgcaagataaaagcaataagacagaaaatgaaaaaaggggaaggggaagaattttttttaagccttagaaaggcattgttaaaaaattcacatttttctttttctgtgcacactaaaatccatgatgattttatctgcactgttcctttgagggaacaagaagcagtcaaggaggctgtctatgaatgcactggtcgggacaggcttggggcaagctgaaaaaactaccacatgacagagaaaaataatttgccaatatattttagagagtcttttcccataggatcagttattcaagtcatacgagtgcactctttttataaaaggatgtgggaaaggccaagagaattttgcattttatctgtgaagtcccgcgagcggtggtaggctgtaatgtgtgagagtgagtggatccccggcagaagggggcagctgaaggcgacggggagagcgcttctgggacttgggcttgtgacaggctgcctgccctctggtccttcagtgccctgctgcatttcacagttgggaagagtggagtgtattatatgaccccaaacaaaagttccattgcgctctcctcagatcgcctgccagtgttgatgacctgaacatttaaatatgaatgaatggggggaaacgaccatctccctggatcccatcagaccagaacaatccactggcccgggcaccctctgttacccctgagctactctttcctgacctccactacctgtccactggacctccctggtcaggagggcattttaccacctagggctgtggcttggcagggtggaggagcggtgggaacagactttttcaatcaagtcatccctgttgattgagacactgtgtttgtttggggtttcttttctcccctccaaaaaaggaagaaggtgaaaccaggagactgggcagagaaagaaaaaaaaaatagtgaacaaaattaggagaatttattttagaagagaaagtagaacccccgaaattggtgatatttgaagagaggtgtctgtgaggaagctaagagcagaaggagagcagcctgtcagaaaacgggctgtccctccctccctaatcacagccctactcacagcaaactccctccctctccattcactcacttacttagggccaatccgttctctctctctctctctctctctctctctctcttcctttccctttctccctctccccctcccttccctccctctctccctctctctcccccttctttctctctcttctctccccctctctcctctctccctgtctctctctccctcccatcctctctctgtctctgtctgtctcccccccaccctgtctctccctccctccctgtctccctccctccctccctccttccttctctcttactcggagacagtcagaactctcctccctgacagccacaaacctacagcactgactgcattcagagaggaacctgcaaacaaaacttcacagaaaactttttgttcttgttccagagaatttgctgaagaggagaaggaaaaaaaaaaaaaaccaaaaaaaaaaaaaaaaaaaaaaaccaaacccacaaaaaaaaaaaaaaaaaaaaaaaaaagaaaaaaaaacctgtgcgtgaggggggaggaaaagcagggccttttaaaaaggcaatcacaacaacttttgctgccaggatgcccttgctttggctgagaggatttctgttggcaagttgctggattatagtgaggagttcccccaccccaggatccgaggggcacagcgcggcccccgactgtccgtcctgtgcgctggccgccctcccaaaggatgtacccaactctcagccagagatggtggaggccgtcaagaagcacattttaaacatgctgcacttgaagaagagacccgatgtcacccagccggtgcccaaggcggcgcttctgaacgcgatcagaaagcttcatgtgggcaaagtcggggagaacgggtatgtggagatagaggatgacattggaaggagagcagaaatgaatgaacttatggagcagacctcggagatcatcacgtttgccgagtcaggttggtgctggcattggcagggggtggggaggggtggggggtaggagggtaaaatatatttctttgacagtcccaggaggaacttcttttccctccagctggaaactgcctgggaaggttattagttattaggtgatggtagcggactagcggacggagggcaggcaggggagggggagaggactttacagaaaaggaattctcggtcaagctctgcctggagatgactggcttacacttgctaaactcagccggtcacacagagaggaagctcggggccaatgttgagctggaaggcagactgtgaggggctgccttgccctgcctgtgaaaccagatctgagcagccggatgaaagccgcggcattttcgggtgcttggggagcagaggaggcttccggaccccatccaagtttttattgagggtagaggggtgagtgtgccaggattggagtggaatggcacagatgaagtcactctcttaaaacaaaccttcccctttaaaagtccaatctggggccacattagagaagcagggcatatttatgagtgacagtcatttttacctttagaaactgtctataagtgcacaggcaccacattcaagacagggaagagctactttgggggacggttgtcactgaaccagcagttacttttgggacactgacttttgctctctgaaaggaaaaaaaaaaaaaaaagaaaacaaccagttttgttctttctaaagttactgagagctctctgccaaggaacgcaaccttgacaaagtactctcagatactatgctgaactcactcaatccttaagaggaagaactttaataaataggttctaatcgttggcccaggaccacactaacctgttgctgaatagcaatacctgtcaaaagtatgggcccatggacttggagccaggctatttttatagttaagtgacacagatcctttgcatgcctgcaagcccatgcacgtcaggcacacagatgtgttaataccgtgttactttcatggtaatgccaggctaaagaactgtatcctttgccaactccatttgaaaggaatgccattgttttgtttggtagagcatatggccagtaaagtatgtgcagggactcccagcatttttgtttaaaagtttgccgcagcagtataaacaattaaggcaacactcagaatttccaatcctgaaaacctgttgactcagatgttctgttttcaagaaaaccatgaaagaccggggcatccttctggaggtgcagatagcctgctggctgtgtggcttccccttgcaggagaagcactggtgtcctacaagcttcccagtttggctctctcaccagaagcctctttcacttggggaaggtcctactttctttccctaaagccctttcttaacccagccccaaaaggcatgatcattaggactttatcttctgaagctttttgaggaagaaagctaggttagaacttttcaagttgacacccattttttctcaacttttcatggtgggaaaagatacaaaagaaaatatttatgatatttggctgcgcgtgtgaaacagatttcagtggtctagagggttgcttcgtgtctttatataccaacctccacacatgatggattcaatgacagctcctatccagttgcctttaactatgtcatacgactaagtatgcctatgcctttgaccacttttaaccgcacgactgttactagcaatatgcccctctttctgacttactggacttgtatagcaaatcactctcttagcatttagagatttggcagtgaaaaaatttgaccatttacattcttgcttatgtgtggtcttcctttcagtgccaatcttctctcagttgtatgagattttgtcattttttacttctcggttaggtgtttagtttgaaagaaaataagcgactttttaaaaagcgattcattggacgttcacgttgagtcaagtttaagatttgtaatgggaaactcctggttgactttacaacttgactttgaattcttagaaaacgtttattacaattgcttatttttctctgaggaatttcacacatcaacttcaagttgatttaatataatttcacatatttaataattgctatatggacagtctactcttcaagcagaaaaccatgtgagcattttgctgctgattttgctaatcaaggaaaagatatttatcatctgaatgattgtagcaaatatatgaacatgaatagcaaagacatatgtcttgctgcttttggaataattcaactttaatgacattccaactatgtggaatgtcaagagtttttggagaatagaaaaagccatgtatttttctttcccttataaccattttgtgcagcatagaatccagacattgtcacccatgagcatgccacaaatgcagacccatcgcggcccctttcaaccttaggattcttcaatttgaggctacgtttactttttgtcttttctctccttgattgttggataaagccaaggcatggctacagaagtagagagcctgcaaaagctgaagtgcctgggactcttttaactgagtttgtcccatcctgcttaggtagaaagtgcccgatttctgtaaagctgatgcgagttgttattgactaaacagcagggaatcactctaaggctctctgaaatgtgtcccaaccaacaaaaatgattttatttttatgtatgtcacatcacccaagatttctcaccaaggttagtgtgttctgtgcatggctggcacaaaacccccaatgtttaccttaaggcctacagagttcctcacaaggaaagacagaagggatgggtaaagccaagctatcgctataaatgtcaatgaagctaaattcagtggcctttttggctgatacagcttatttttactttattttgactcatgacagtagctggtcaatcgatgcatagtaataatgtacctctgagtctccatatgctttcaaacctggatataggttctggtaattagcttagcaattgatagcacctgttgtagaaagaccaggaaaagaaagacaaacaaaacaccaagaaatggatgtgctcacgtagcctaggtgttgttgagtgcaacacctaagtctaccccttggaggatactatgtatggaagatttgagttcgaagtttacaccgcccagacagggctccaagaagccttgcttggatgaccattttccccaccccaagaaagccatctcaaaatggagctgactcccaccattccatgcccatcgtccgaacttttctgtgaatcacccatcccttagggacgcctttaggggttacacgttctcttctgtgaataatggggaagagtggccacaagagggcgcgttccaaagacttttgctccttgtcagtttatccagggaaaggcagttgtgcctactggaagcaccccgtctgtagcgcccagtaatcttggtgattatcagttacctcctgctccctctcatcctgcagaaaaagttaggaatttatgagatgggagaagcatgactacctgtaatacattaaatgagacagaaggaaaggaaatggaaattctagtgatacatgtgaacattccggagctctatggaaggcagacgagtgataaatttcaaaagcaaacaaagcagagcagggagaaatgtgaccatgaatcatcagcgatactgatttgctcacaagtctctccctaatacggtctcccggatcgtaacaaaaacatcttccgtctcccctgattttgttgcctagttttccgccttatcaacagtttccaccagcgacaaatgacaagtgacttcaaacagggaggaaaaaggttctttctttaatgccttgtgggaacatggtgttcagcttctgaggatgcgtttgtttccgaactgagggtgtggagagaaatggtggggaaagatggggaaagagattaatagtggtctgtggcctgtgcagtggatggactgggctgggggtggcggagatgccagggtggaaagtacgttgtaatatttaaagaactgcagtaataccttcccaggcacttttcttgaaaacacatatttgtcttggcccctcttctgctaaaaaatacttgcacatgatctcctagctgtagttcagaattcttcatactcgactggttcctaggtccaaaatcaaaagtgccaaagttctcaggaactttggaagaagtctctgaaattttgtgggtcgaaccttaagaatttttgctacttgtaggaatctaaaacccctttctcctgaaatatttaacctttttcatcaccattttaatggaagaggcacggatgatggatgtttgtggctgggcatttataaatcaataacggaccctaaggagggacattaaagctaaaaaattaatcaagataatttatggccaaacctatagttctactgcaggaaagatcctctactgtaggtcaaaggaggaataaccttaagacctcacttgctgctttctgcagaaacccctggaagcagtccaaatgcaaagttagagcttcagagaacgcaccctgtaaatggtagttgtgtatacccttactattgactataccatatctaggcacagtgaaatcttgatgaagaatggaaaattaaaggaacagacgctttttacagggaggcttcccccaacccccatcccatggtaagtttaaacatgttctgtaaacaacgaggctttccacattcacattagagacataattattgcccatatgtaaaagagcaacatatttcaggcaggaccctggtgaggaaaacaaaaccaaatcgaaacactgcatgtgtgtgttgcttatttaactgaaaatgttcatacacccacaaatctgagatgctggacttttggatgagtccatcattttgcatcttagtgtagggggagggaacaacaaggggcttagctgcttaacccttggcatgccttcatgattgacttattcaaaagattttgaaagcaaaggaaaatgtgctgcaaacacccttccaggtatctttccttccagcttacacagtctctcctctgtccaatccttcccacccggcagcatttcagaggtattccctgtgaggtacaaattttctctttgcctatttttctgcacctctttttctctctctttggtatgtgtccaccgagctcatagaggtttaagtgatgaaatattatcacccacatgggtttgcgtgggactttcttagtgaattactcaggcagagcaggctgtgatacagccttgctcacaagcctcgggagggaaaaaatagcacagaggatgaaaagaatattatcagagagtaggtaatgaaaggttagcaaagcgaccagctatatctggctagctaggtaatagtgcaggaacctaggtcgcacctgtacaaactaatgcagaacctgctcacggcgcattatgggaaggctttcatttcaagattttacagcatgagatattcaagtgaaaactaaaactgattagaaattgatcctgaacatcccagccttagtcaaccttcccttttccaaattgttatgcaaggagattggaggattggggcatcttgaaagtgtcactgcagtatagccatctctctcaggtaatataaagataaagggaatataataaattgacctgttatttattatatttttcatacctaggacattccgaggctgtaatatatttctgaagcctgcagccctgataaacatcaatcccacgtcagtttccagcagtctcatctccccacccccttctgcaatgaaagctaatgtaaaagaaagaaatatgcactgcttaataagtcagaatacaatagaacttgtaaaatgtacctgcatataaggtagacattaggaagacttgaatctctctcttccccctgttctcctgagcattatggcaacagcattttcatgaaattagatctgttttattttttttcctgataaaatatcatgcaatatacaaatagcagttccagaaatggacaccaggagaaggaggcgacaggcatgtcaattagtagggggaaaatccaaatgtcagaaatatgggggagagagaaagcacgcaggcagtggatgcaaatacagggaacagagtctttcaattcagataattaaacggatgcctctccataatacgcaggcgatgccatgcagttaattatcagccaagaccagcatgaaagtcattttatgatgactctctgatcctaatataacagcacctgacagattgagccccctctaatgagtactctctttgtacaatcctctctcaggaacactaaatcatttgcttccaagtacagctgcctgtgaagaaggggtggggctagatcatgcatcagaaacctgctcttgtgaaatgaggggctgtcctgtaggctgtgtgactagaagccagcagcctcagcctctctaaccctacaaaagcaatttgcacgcggctgtccctaattctagtcagccaactaaccctccctcggcacccccacccaaacatctggatgttattcatggaaattccacttcatgcgggtcagtactgctgtccatcggccttcaccctgaccccttctggcaggtgtggacgagagcagagtagatcccatggggatgagttacccaaaacccagtgagcctccctatgtggggcactagtcagatgctccagtttcacactctttcctggaaaaacaaaacccaaccttgtgccctctgggttctctaatttagcagctactatctctctgtttttggagtgacaccctgtgcagtttaggatttcagaagctgtcccgcatagaagcagaagggaaaacagcaggtagcttgttaacattctccatggggcaaggcagatgtgcccatgctggaggtaacctgcacaccctccaggccagttatccgaggcttgggaggtttccctcggtcttctcctaaggccttggcaggacgctgccaccctaaaatcaactgctgattgcctttttagatgtaaatgattaagctctgcttctgggaatcttctctttactttgttaagaaacaaacaacaacaacaaacccccaccaattcttagcaaaggggaatatagaattcagattttgaaaaaataagtcatcatgcttcctaaaataagacagcttctccctctaactgctctctgctctggtattctatctaatcataaacccagctttattattcatttcaactcctgccaaagacatgaggtcggagtcagaggaactccccttaccaccaccaccaccatcatcatggccagcatcctcgtaagtttatagaaagatgccagagaacctttcatatccatctgcagccctgcttggcccttgcctcagtgaatttaccactatcataatcacagtgtgcagagtgtgttaaattaagaacagaatctacagtacgcaatgcacagaaaagcctgccttctgctgcagagaacttgaaactgtgcctaaaatttatagtaccgtaaacatctcagggcctcgagtgataagtatggctggatttccgttaactatagaaattcaggcagggagatcctcccagggagttgcgagttctaagatgaacttcttgaagattgttcacagatttgtgcatgggatacatgtacagcggacagttataaggaggtccatggtcagggaaaagagggtatgtttccatatgccacaaagggggaaaaaaggaagtgagagaacatatttgattaatcaaaaaattttagtttggatacctgctttcatagtaattgttgctgcatcattaaacatacaggtgcttacgaaaagagaaggaaataggtgactttctaattttagagttaggctagaactgagtggttgctaaattcaactgccctgacaatgtggagatttcctgtccattagcagcgattgctatttgacatttgtttctggtgcccattaggctgcactctaatgggtcagaggcaaacatcggggattcagaggtacaaggtggctctcttaatttaatagaactcaatgctaaggacgcctccatttgttaataagtaatcaagtcattgcctactttctgctgaacattagactatgatagtgaccttagaccctgggcattctaaaccaggctggcaggagggtggcggtggaagtgatgtgaaggaagcctcctagaggaagtgttgtccaaacaatctgaaaattgaaacattattaaaggcagcactaagggtgatgtgttggagttggggcaggagcacttgaggcagaaggaacagcaggtgtcactgcctgcgggtgagacagggggtggaattctcaaggccttacaccccagagaccaggactgggcaagagctggcattcaaggaaggaacagcatgtacagagcccaaagtcccaggcactttctgttggatactgagagcaataggaattcagtaaaggactttcaagaagtgatgtgatcagatccacctgtgagaaagatgcctttggctgcttcatggagaaatgactggagaggaggcctgccttagtgttgcagaggcaaagtaaagaacgtgctgctgcagtgacccagcaaagaggtgatgggggaggaatcaggctgtgacaggggaagaggaagctgactcagtgtgtcccgactgcacagacctacatagtgaggcgaggccaggggctgcatttttgtctgagaatgatatttccttagctctctagagcttacagtgtcttttcgtttatgttatctcagttgatcttcctaaacctggagataacaggtcacatgtccttatgtcattcctattttatagacgatgaaactgaggttaagcaattagtcaacagacacagaatcacaggccctcttcattctaaagcaagggtccaaaaccttttttctataaagggccagagagtaaatgatttacgctttgtgagccagagtctgttgtagctactcagctctgggttattctggtgcaaaaacagctgtaggcagcatgtacagaaatgagcataaccatgctccaacaaaactttatttacaggcactaacgtttaaatttcagacaattttcacatgtcacaaaataccacttttctttaaccacttaaaagtataaaaaccattcttagtttgcaggcagtacagaaagagtttcggcccatgggccgtcattcgctgacccctgttcgagaggatctatcacagaagactcttgcttgcctgaaatttgtgagtgcatgtaaatgttggaattaacaggtgtcactgttttctcttatgctgtcttttgtcttcaggaacaaccaggaagacgctgcacttcgagatttccaaggaaggcagtgacctgtcagtggtggagcgtgcagaagtctggctctttctaaaagtccccaaggccaacaggaccaggaccaaagtcaccatccgcctcttccagcagcagaagcacccgcagggcagcttggacacaggggaagaggccgaggaagtgggcttaaagggggagaggagtgaactgttgctctctgaaaaagtggtagatgctcggaagagcacctggcacgtcttccctgtctccagcagcatccagcggttgctggatcagggaaaaagctccctggacgttcggattgcctgtgagcagtgccaggagagtggcgccagcctggtgctcctgggcaagaagaagaagaaagaagaggagggggatgggaaaaagaagggtggaggtgaaggtggggcaggagcagatgaggagaaggagcagtcgcacagacctttcctcatgctgcaggcccggcagtctgaagaccaccctcatcgccggcgtcggcggggcttggagtgtgatggcaaggtcaacatctgctgtaagaaacagttctttgttagtttcaaggacatcggctggaatgactggatcattgctccctctggctatcatgccaactactgcgagggtgagtgcccgagccatatagcaggcacatccgggtcctcactgtccttccactcaacagtcatcaaccactaccgcatgcggggccacagcccctttgccaacctcaaatcgtgctgtgtgcccaccaagctgagacccatgtccatgttgtactatgatgatggtcaaaacatcatcaaaaaggacattcagaacatgatcgtggaggagtgtgggtgctcatagagttgcccagtccagggggaaagggagcaagagttgtccagagaagacagtggcaaaatgaagaaatttttaaggtttctgagttaaccagataaatataaattaaaaaaacaaaaaaacaaaaaaacaaaagtaaattaaaaacaaaacctgatgaaacagatgaaggaagatgtggaaaaaaatccttagccagggctcagagatgaagcagtgaaagagacaggaattgagaggcaaagggagaatggagtaccctttatttcttctgaaatcacactgatgacatcagttgtttaaatggggtattgtcctttccccccttgtggttcccttgtgagccttgagtcaactaatctagtctgcagtagtgcggactagagcaacccaaatagcatctagaaagccatgagtttgaaagggcccatcacaggcactttcctacccaattacccaggtcataaggtatgtctgtgtgacacttatctctgtgtatatcagcatacacacacacacacacacacacacacacacacacacaggcattcccacacattacatatatacacatactggtaaaagaacaatcgtgtgcaggtggtcacacttcctttttctgtaccacttttgcaacaaaacaaaacaaacaacattaaaaaattgagaacaagtatggaaagaatgaaagatcaaggaaaaaagaataccaagttacatttcgttaaggtgcttatgatcttagaactatgcaacctaataggtttgaaactgtttacctgagagagaacaaaaagagagacttttttgtattggaagtaatctgattaatttttattttcttcaaggagagatacttgaaaggaatatgtttgtccatctgttggatccaaacatttctatattttgtaaatgttgttgttgtttttttttaatcgtttactatttgcactacaatggtgtttgacctgtctaatccttatttaacaagtattttctttgagtgggggtgggggtggggtttaagagctgcacttaatgtgagctataaaagaactgctacagcacacaaaatagctatttttattattataattataattattattattattttgtaccttaaaaaatagacacatacaccaaagacatttgtgtgagcctttaaacagtctgtctgtggttggtatcattcaccatcaatgagtcaggggttgggattcaaggttgagtagtgtggattgtgttcaggcttaaaagacctgagaagtttggtttttgactccttttacatccatgaaacaggacatttcatactggatgtacagtagttgtacactgttggatatcaagttcaatcaaattcatggaactacatgcttgtatgtgtatatatacattgcttgtgcatatgcatatctgtatgtatatatacatgtattgtaccatgtccatacacattttaagcacttcaggctgtcattttttaatgttcttaaagcaatgaatgtttgtgtgcaaaacacagtatttttaagaaggataggctatagtttttgcttttactctgaactaggtgggcacatttcaaaaattcggatgggaaaaagcctgaaaattccagtgaatattcagcaaggccctcttttgttgtacagggatcaaatttcctcctcttttttgtgccccctcccacttctacaagttttcccctatggggaaaacaggatgataatcaaaactctgggcggaagtttttccaacttagtgtctactggaatcaatcttaaatcagaagctttttcagaaaaatataatatttaggtcagaattagagttaagtgtatttttaaaaaatgattaaggcttggttatgagaaatattacctgtaccagctgggaaaaataatgtcgccactaactaaaagataattaatttgggagaaggtgttaagagagggagagtaaggaagagaacagttaagaagaggcagagatgagggcagtagtaaaaaatctctaaatttttaatttatagccaaaactcttcatgtgtaaatttgtatcgattcagatgcagagaggaaaaaaaaaaaaaaaaaaaaacctttgttttataaatatcaaagtacatgcttaaagccaagtttttatctagtttattctagtatttagcttgcctagaatagctaataaattattcatgtatgtgcttttgaaaatacagagccttatttttacagacttgtgtgaagttggcaaatattttgaaaaaaggaaaaaagtttctaataattgggaacaattacattaattaatattttgtaaaatattgaagcttttagccctatgtcaatttgtagattaaaataaattaattataggaaaggaagatatcagtgagaaaccaaagattacaaaaggtggtttagctctccttgaaaaatatactcagttggtatactgtaacacttggctatatgtaggcaatgtcactacagggcaaatacacttactgtgttctagaggccgccctttcttatgcagaaaatacaatatgcactgcatgagaagcttgagagtggattctaatcaaggtctattgaccttggatatcatgcatgtgggaaggtgggtgtggtgagaaaagtgttaaggcaagagtagatggccatgttcaactttacaaaatttcatggaaaactggcagtattttgaactgcatcttctttggtactggtacctgcagaaacagtgtgagaaattaagtcctggttcactgcgcagtagcagagatggtcaaggatatggaaaaagcagaaatttgcaaagaaagctgatacccatgtatagttcccattcatctcaaatatatctgctacctttttaagctaagtcctagacatatcggggataacataggggttgattagtgaccacagttatcagaagcagagaaatgtaattccatattttatttgaaacttattccatattttaattggatattgaatgattgggttatcaaacacccacaaactttaattttgttaaatttatatggctttgaaatagaagtataaattgctaccattttttgataacattgaaagatagtattttaccatctttaataatcttggaaaatacaagccctgtgaacaatcaccctttcacctagcagcatgaggccaaaagtaaaggctttaaatgctaacatatgggattcttagtagtatgttttttttttgaaaccagggtggctctatcttagcttactatctcctcgctctttctctaaggctaaactctaggctcttaaaaatctgcccacaccaatcttagaagctctgaaaaggatttgtcttcaaatatcttttaatagtaatatgtattttatggaccaaattgacattttctatttttatttttccaaaaaagtcaggtgaatttcagcacactgagttgggaatttcttatcccagaagaccaaccaatttcatatttatttaagattgattccatactccattttcaaggagaatccctgcagtctccttaaaggtagaacaaatactttttatttatttattttttcaccattgtgggattggacttttaagaggtgactctaaaaaacagagaacaaatatgtctcagttgtattaagcatggacctatattatcatattcacttaaaaaaatgatttcctgtgcaccttttggcaacttctcttttcaaggtagagaaaaacttagtcaccctgaaaacccacaaaataaataaaacttgtagatgtgggcagaaggcttgggggtggacatcgtatgtgtttaaattaaaccctgtatcactgagaagctgttgtatgggtcagagaaaacgaatgcttagaagctgttcacatcttcaagagcagaagcaaaccacatgtctcagctatactattatttattttttatgcataaagtgaatcatttcttctgtattaatttccaatgggttttaccctctatttaaatgctttgaaaaacagtgcattgacaatgggttgatatttttctttaaaagaaaaatataattatgaaagccaagataatctgaagcccgttttattttaaaactttttatgttctgtggttgatgttgtttgtttgtttgtttttattttgttggatttttactctgtttttttgttttgttttgttttttttgcatactacatgcagttctttaaccaatgtctgtttggctaatgtaattaaagttgttaatttatatgagtgcatttcaactatgtcaatggtttcttaatatttattgtgtagaagtactggtaatttttttatttacaatatgtttaaagagataacagtttgatatgttttcatgtgtttatagcagaagttatttatttctatggcattccagcggatattttggtgtttgcgaggcatgcagtcaatattttgtacagttagtggacagtattcagcaacgcctgatagcttctttggccttatgttaaataaaaagacctgtttgggatgtattttttattttta

SEQ ID NO: 392 - DNA, 19605 bp, Macaca mulatta
  source 1..19605: mol_type = genomic DNA
agcagaggaactgggatctgatctgggtttgttttgtgcaccaccgcccccatcacctacacacacacacacacacacacacacaactttgtgtggggggggaggggatgttatcaggacactagggttcatgtgcggggcagaggtgagtttagatgccctgaaggtcattgactccactaattctcagcatgaagggtggagaagttcctttcttataaagggtttctgttcacctagtgctaaactgaggggcaggtttggagttcaccatcattaatcctatttctgtctttgccactcagattcactctcttgctctacaacttaatgatttttttcctacttcatttctgcatatgcagttcttagaatactccttccccccacccccatgcagctcagcacccacactttctctgtatctagccaagagagaccctcttacacagaaaacttctggtgtcctaatggaacctgcttaagccacacatcaggaggccagagcctttatattttgcttgcgggcacagtgaaaagtttattttatgcatgttaaatcctgcatacaaaacaacatatctggtcatatggctctcattagttcccaattttgcacattttatccaacttgtcatgagaactgggcttatgcttcaactatactccttcaaacaacccttcaccattcttgtcagaggacttcttcctcctgtgttatttaccagacttgccaacacctctccccgcccccaaaaagcctgaccagctttacccctgtttcaaggagtgttcacttcttttcattaatctcctgttatatttgtaacaatttagaaattataggagttgaagttctggtaaaaaaagaatgatgcatgaggatttttgttgttgttgttgttgttgttgttgttgtgtgtgtgtgtgtgtttggttagttaggatggattctaaagacctgggaaggatacttatgaagttcacttaaagagaatgactatttccaaagttcttgatttatgaagcaggcattcaatttcaagatgtaaaataatagtgtaagttggttgcagtggggggagaccatcatcatatgattatacagattttcccaattttttcctcaatgaaatagcttatttaaaaaaaataaaattagaatccatataaagaacactaccaattttctttcctgaaagaaacaataaaatactttgtaaatagaagcaacttcatgaagtaacagatgttttatgtaaagacataaaactgaacctgaatataacgagacgtgtgtgcgagtagtaaaagaaaagttgaaagttggacacactcattgagacatatctatttgattccaatatttttctaaaaggtagagtaatcctagccagaggtttcactggctcagtgcatcacccagtagtgtctcagaagccaggaagggctttccattagataatgaattatgaaatgtctcacactggaaaaaccagtcatctgctgatgtcatgctgattccaaccaatcccaaacaaagccccagccctcctctgtttcagtggtaccaatgtgtggtgtacaaataagtagtacagtataaaacttcacagtgccaataccatgaagaggagctcagacagctcttaccacatgatacaagagccggctggtggaagagtggggaccagaaaggtaatgctttttaactcttacttctgagctctttacacattcaaagataggatagctaggaggaattttacaactaattggcatttccaatgtgcattgtgatgtgtacctttttatattattcaggcaggttaatatagcttttaatagtcctagagcatgcaaatagattatatgtttatacaacccactcagcacatatatacaagtacatatgccaaagagaaagctatttttaagagttacattcgcaaacagtaaattcagggaacacacacgtactcagatgcagagagaatccaaatattgataacttgcagttatctaaatgctgctattaggactcttgagttgtttagagtcattaaacttttggttgtatttcagactttcttgtaaaacttaattggactacaaaatgttttggatactgtatatgtgactccaaataggtggatgatgttaagtattatagtacaaagatgttttataaaaccattataacacaaatgtcccctgcctcccccattctctttcaccatccccgtaaaaaatatgaggctttttaggcaatgttgacaaagtttcaacaataatggtggagtaattgatgtttctggagctgaaaccccaaaggtgttaggttacttgtaacagaaaaagtcttacaaatagttgttttggaaaaggagacagtatatacaattcagagagcattgttaacctgtgaaaactgtaattttaacttagtgtcacaattttcttgccctcttccccttgcactcagatcttatgcttgtagtaatgatatttattaactctttccacctaaactgcattgcttgactataatgctatgaacacactaggtgtcagatataagctgagtgtatcttcagaaaccaagagggcttatgtgtgggaaagaaaccgagagggaaggaacgctttaacagatggaccccttaaagattcttctgcaagataaaagcaataagacagaaaatgaaaaaaggggagggggaagaattttttttaagccttagaaaggcattgttaaaaaattcacatttttctttttctgtgcacactaaaatccatgatgattttatctgcactgttcctttgagggaacaagaagcagtcaaggaggctgtctatgaatgcactggtcgggacaggcttggggcaagctgaaaaaactaccacatgacagagaaaaataatttgccaatatattttagagagtcttttcccataggatcagttattcaagtcatacgagtgcactctttttataaaaggatgtgggaaaggccaagagaattttgcattttatctgtgaagtcccgcgagcggtggtaggctgtaatgtgtgagagtgagtggatccccggcagaagggggcagctgaaggcgacggggagagcacttctgggacttgggcttgtgacaggctgcctgccctctggtccttcagtgccctgctgcatttcacagttgggaagagtggagtgtattatatgaccccaaacaaaagttccattgcgctctcctcagatcgcctgccagtgttgatgacctgaacatttaaatatgaatgaatggggggaaatgaccatctccctggatcccatcagaccagaacaatccactggccccggcaccctctgttacccctgagctactctttcctgacctccactacctgtccactggacctccctggtcaggagggcattttaccacctagggctgtggcttggcagggtggaggagcggtgggaacagactttttcaatcaagtcatccctgttgattgagacactgtgtttgtttggggtttcttttctcccctccaaaaaaggaagaaggtgaaaccaggagactgggcagagaaagaaaaaaaaaatagtgaacaaaattaggagaatttattttagaagagaaagtagaacccccgaaattggtgatatttgaagagaggtgtctgtgaggaagctaagagcagaaggagagcagcctgtcagaaaacgggctgtccctccctccctaatcacagccctactcacagcaaactccctccctctccattcactcacttacttagggccaatccgttctctctctctctctctctctctctctctctctctctctctcttcctttccctttctccctctccccctcccttccctccctctctccctctctctcccccttctttctctctcttctctccccctctctcctctctccctgtctctctctccctcccatcctctctctgtctctgtctgtctcccccccaccctgtctctccctccctccctccctgtctccctccctccctccctccttccttctctcttactcggagacagtcagaactctcctccctgacagccacaaacctacagcactgactgcattcagagaggaacctgcaaacaaaacttcacagaaaactttttgttcttgttccagagaatttgctgaagaggagaaggaaaaaaaaaaaacaccaaaaaaaaaaaaaaaaaaaaccaaacccacaaaaaaaaaaaaaaaaaaaaaaaaagaaaaaaaaacctgtgcgtgaggggggaggaaaagcagggccttttaaaaaggcaatcacaacaacttttgctgccaggatgcccttgctttggctgagaggatttctgttggcaagttgctggattatagtgaggagttcccccaccccaggatccgaggggcacagcgcggcccccgactgtccgtcctgtgcgctggccgccctcccaaaggatgtacccaactctcagccagagatggtggaggccgtcaagaagcacattttaaacatgctgcacttgaagaagagacccgatgtcacccagccggtgcccaaggcggcgcttctgaacgcgatcagaaagcttcatgtgggcaaagtcggggagaacgggtatgtggagatagaggatgacattggaaggagagcagaaatgaatgaacttatggagcagacctcggagatcatcacgtttgccgagtcaggttggtgctggcattggcagggggtggggaggggtggggggtaggagggtaaaatatatttctttgacagtcccaggaggaacttcttttccctccagctggaaactgcctgggaaggttattagttattaggtgatggtagcggactagcggacggagggcaggcaggggagggggagaggactttacagaaaaggaattctcggtcgagctctgcctggagatgactggcttacacttgctaaactcagccggtcacacagagaggaagctcggggccaatgttgagctggaaggcagactgtgaggggctgccttgccctgcctgtgaaaccagatctgagcagccggatgaaagccgcggcattttcgggtgcttggggagcagaggaggcttccggaccccatccaagtttttattgagggtagaggggtgagtgtgccaggattggagtggaatggcacagatgaagtcactctcttaaaacaaaccttcccctttaaaagtccaatctggggccacattagagaagcagggcatatttatgagtgacagtcatttttacctttagaaactgtctataagtgcacaggcaccacattcaagacagggaagagctactttgggggacggttgtcactgaaccagcagttacttttgggacactgacttttgctctctgaaaggaaaaaaaaaaaaaaagaaaacaaccagttttgttctttctaaagttactgagagctctctgccaaggaacgcaaccttgacaaagtactctcagatactatgctgaactcactcaatccttaagaggaagaactttaataaataggttctaatcgttggcccaggaccacactaacctgttgctgaatagcaatacctgtcaaaagtatgggcccatggacttggagccaggctatttttatagttaagtgacacagatcctttgcatgcctgcaagcccatgcacgtcaggcacacagatgtgttaataccgtgttactttcatggtaatgccaggctaaagaactgtatcctttgccaactccatttgaaaggaatgccattgttttgtttggtagagcatatggccagtaaagtatgtgcagggactcccagcatttttgtttaaaagtttgccgcagcagtataaacaattaaggcaacactcagaatttccaatcctgaaaacctgttgactcagatgttctgttttcaagaaaaccatgaaagaccggggcatccttctggaggtgcagatagcctgctggctgtgtggcttccccttgcaggagaagcactggtgtcctacaagcttcccagtttggctctctcaccagaagcctctttcacttggggaaggtcctactttctttccctaaagccctttcttaacccagccccaaaaggcatgatcattaggactttatcttctgaagctttttgaggaagaaagctaggttagaacttttcaagttgacacccattttttctcaacttttcatggtgggaaaagatacaaaagaaaatatttatgatatttggctgcgcgtgtgaaacagatttcagtggtctagagggttgcttcgtgtctttatataccaacctccacacatgatggattcaatgacagctcctatccagttgcctttaactatgtcatacgactaagtatgcctatgcctttgaccacttttaaccgcacgactgttactagcaatatgcccctctttctgacttactggacttgtatagcaaatcactctcttagcatttagagatttggcagtgaaaaaatttgaccatttacattcttgcttatgtgtggtcttcctttcagtgccaatcttctctcagttgtatgagatttttgtcattttttacttctcggttaggtgtttagtttgaaagaaaataagcgactttttaaaaagcaattcattggacgttcacattgagtcaaatttaagatttgtaatgggaaactcctggttgactttacaacttgactttgaattcttagaaaacgtttattacaattgcttatttttctctgaggaatttcacacatcaacttcaagttgatttaatataatttcacatatttaataattgctatatggacagtctactcttcaagcagaaaaccacgtgagcattttgctgctgattttgctaatcaaggaaaagatatttatcatctgaatgattgtagcaaatatatgaacatgaatagcaaagacatatgtcttgctgcttttggaataattcaactttaatgacattccaactatgtggaatgtcaagagtttttggagaatagaaaaagccatgtatttttctttcccttataaccattttgtgcagcatagaatccagacatagtcacccatgagcatgccacaaatgcagacccatcgcggcccctttcaaccttaggattcttcaatttgaggctacgtttactttttgccttttctctccttgattgttggataaagccaaggcatggctacagaagtagagagcctgcaaaagctgaagtgcctgggactcttttaactgagtttgtcccatcctgcttaggtagaaagtgcccgatttctgtaaagctgatgcgagttgttattgactaaacagcagggaatcactctaaggctctctgaaatgtgtcccaaccaacaaaaatgattttatttttatgtatgtcacatcacccaagatttctcaccaaggttagtgtgttctgtgcatggctggcacaaaacccccaatgtttaccttaaggcctacagagttcctcacaaggaaagacagaagggatgggtaaagccaagctatcgctataaatgtcaatgaagctaaattcagtggcctttttggctgatacagcttatttttactttattttgactcatgacagtagctggtcaatcaatgcatagtaataatgtacctctgagtctccatatgctttcaaacctggatataggttctggtaattagcttagcaattgatagcacctgttgtagaaagaccaggaaaagaaagacaaacaaaacaccaagaaatggatgtgctcacgtagcctaggtgttgttgagtgcaacacctaagtctaccccttggaggatactatgtatggaagatttgagttcgaagtttacaccacccagacagggctccaagaagccttgcttggatgaccattttccccaccccaagaaagccatctcaaaatggagctgactcccaccattccatgcccatcgtccgaacttttctgtgaatcacccatcccttagggacgcctttaggggttacacgttctcttctgtgaataatggggaagagtggccacaagagggcgcgttccaaagacttttgctccttgtcagtttatccagggaaaggcagttgtgcctactggaagcaccccctctgtagcgcccagtaatcttggtgattatcagttacctcctgctccctctcatcctgcagaaaaagttaggaatttatgagatgggagaagcatgactacctgtaatacattaaatgagacagaaggaaaggaaatggaaattctagtgatacatgtgaacattccggagctctatggaaggcagacgagtgataaatttcaaaagcaaacaaagcagagcagggagaaatgtgaccatgaatcatcagcgatactgatttgctcacaagtctctccctaatacggtctcccggatcgtaacaaaaacatcttccgtctcccctgattttgttgcctagttttccgccttatcaacagtttccaccagcgacaaatgacaagtgacttcaaacagggaggaaaaaggttctttctttaatgccttgtggaaacatggtgttcagcttctgaggatgcgtttgtttccgaactgagggtgtggagagaaatggtggggaaagatggggaaagagattaatagtggtctgtggcctgtgcagtggatggactgggctgggggtggcggagatgccagggtggaaagtccgttgtaatatttaaagaactgcagtaataccttcccaggcacttttcttgaaaacacatatttgtcttggccccccttctgctaaaaaatacttgcacatgatctcctagctgtagttcagaattcttcatactcgactggttcctaggtccaaaatcaaaagtgccaaagttctcaggaactttggaagaagtctctgaaattttgtgggttgaaccttaagaatttttgctacttgtaggaatctaaaacccctttctcctgaaatatttaacctttttcatcaccattttaatggaagaggcatggatgatggatgtttgtggctgggcatttataaatcaataacggaccctaaggagggacattaaagctaaaaaattaatcaagataatttatggccaaacctatagttctactgcaggaaagatcctctactgtaggtcaaaggaggaataaccttaagacctcacttgctgctttctgcagaaacccctggaagcagtccaaatgcaaagttagagcttcagagaacgcaccctgtaaatggtagttgtgtatacccttactattgactataccgtatctaggcacagtgaaatcttgatgaagaatggaaaattaaaggaacagacgctttttacagggaggcttcccccaacccccaccccatggtaagtttaaatatgttctgtaaacaacgaggctttccacattcacattagagacataattattgcccatatgtaaaagagcaacatatttcaggcaggaccctggtgaggaaaacaaaaccaaatcggaacactgcatgtgtgtgttgcttatttaactgaaaatgttcatacacccacaaatctgagatgctggacttttggatgagtccatcattttgcatcttagtgtagggggagggaacaacaaggggcttagctgcttaacccttggcatgccttcatgattgacttattcaaaagattttgaaagcaaaggaaaatgtgctgcaaacacccttccaggtatctttccttccagcttacacagtctctcctctgtccaatccttcccacccggcagcatttcagaggtattccctgtgaggtacaaattttctctttgcctatttttctgcacctctttttctctctctttggtatgtgtccaccgagctcatagaggtttaagtgatgaaatattatcacccacatgggtttgcgtgggactttcttagtgaattactcaggcagagcaggctgtgatacagccttgctcacaagcctcgggagggaaaaaatagcacagaggatgaaaagaatattatcagagagtaggtaatgaaaggttagcaaagcgaccagctatatctggctagctaggtaatagtgcaggaacctaggtcgcacctgtacaaactaatgcagaacctgctcacggcgcattatgggaaggctttcatttcaagattttacagcatgagatattcaagtgaaaactaaaactgattagaaattgatcctgaacatcccagccttagtcaaccttcccttttccaaattgttatgcaaggagattggaggattggggcatcttgaaagtgtcactgcagtatagccatctctctcaggtaatataaagataaagggaatataataaattgacctgttatttattatatttttcatacctaggacattccgaggctgtaatatatttctgaagcctgcagccctgataaacatcaatcccacgtcagtttccagcagtctcatctccccacccccttctgcaatgaaagctaatgtaaaagaaagaaatatgcactgcttaataagtcagaatacaatagaacttgtaaaatgtacctgcatataaggtagacattaggaagacttgaatctctctcttccccctgttctcctgagcattatggcaacagcattttcatgaaattagatctgttttattttttttcctgataaaatatcatgcaatatacaaatagcagttccagaaatggacaccaggagaaggaggcgacaggcatgtcaattagtagggggaaaatccaaatgtcagaaatatgggggagagagaaagcacgcaggcagtggatgcaaatacagggaacagagtctttcaattcagataattaaacggatgcctctccataatacgcaggcgatgccatgcagttaattatcagccaagaccagcatgaaagtcattttatgatgactctctgatcctaatataacagcacctgacagattgagccccctctaatgagtactctctttgtacaatcctctctcaggaacactaaatcatttgcttccaagtacagctgcctgtgaagaaggggtggggctagatcatgcatcagaaacctgctcttgtgaaatgaggggctgtcctgtaggctgtgtgactagaagccagcagcctcagcctctctaaccctacaaaagcaatttgcacgcggctgtccctaattctagtcagccaactaaccctccctcggcacccccacccaaacatctggatgttattcatggaaattccacttcatgcgggtcagtactgctgtccatcggccttcaccctgaccctttctggcaggtgtggacgagagcagagtagatcccatggggatgagttacccaaaacccagtgagcctccctatgtggggcactagtcagatgctccagtttcacactctttcctggaaaaacaaaacccaaccttgtgccctctgggttctctaatttagcagctactatctctctgtttttggagtgacaccctgtgcagtttaggatttcagaagctgtcccgcatagaagcagaagggaaaacagcaggtagcttgttaacattctccatggggcaaggcagatgtgcccatgctggaggtaacgtgcacaccctccaggccagttatccgaggcttgggaggtttccctcggtcttctcctaaggccttggcaggacgctgccaccctaaaatcaactgctgattgcctttttagatgtaaatgattaagctctgcttctgggaatcttctctttactttgttaagaaacaaacaacaacaacaaacccccaccaattcttagcaaaggggaatatagaattcagattttgaaaaaataagtcatcatgcttcctaaaataagacagcttctccctctaactgctctctgctctggtattctatctaatcataaacccagctttattattcatttcaactcctgccaaagacatgaggtcggagtcagaggaactccccttaccaccaccaccaccatcatcatggccagcatcctcgtaagtttatagaaagatgccagagaacctttcatatccatctgcagccctgcttggcccttgcctcagtgaatttaccactatcataatcacagtgtgcagagtgtgttaaattaagaacagaatctacagtacgcaatgcacagaaaagcctgccttctgctgcagagaacttgaaactgtgcctaaaatttatagtaccgtaaacatctcagggcctcgagtgataagtatggctggatttccgttaactatagaaattcaggcagggagatcctcccagggagttgcgagttctaagatgaacttcttgaagattgttcacagatttgtgcatgggatacatgtacagcggacagttataaggaggtccatggtcagggaaaagagggtatgtttccatatgccacaaagggggaaaaaaggaagtgagagaacatatttgattaatcaaaaaattttagtttggatacctgctttcatagtaattgttgctgcatcattaaacatacaggtgcttacgaaaagagaaggaaataggtgactttctaattttagagttaggctagaactgagtggttgctaaattcaactgccctgacaatgtggggatttcctgtccattagcagcgattgctatttgacatttgtttctggtgcccattaggctgcactctaatgggtcagaggcaaacatcggggattcagaggtacaaggtggctctcttaatttaatagaactcaatgctaaggacgcctccatttgttaataagtaatcaagtcattgcctactttctgctgaacattagactatgatagtgaccttagaccctgggcattctaaaccaggctggcaggagggtggcggtggaagtgatgtgaaggaagcctcctagaggaagtgttgtccaaacaatctgaaaattgaaacattattaaaggcagcactaagggtgatgtgttggagttggggcaggagcacttgaggcagaaggaacagcaggtgtcactgcctgcgggtgagacagggggtggaattctcaaggccttacaccccagagaccaggactgggcaagagctggcattcaaggaaggaacagcatgtacagagcccaaagtcccaggcactttcttttggatactgagagcaataggaattcagtaaaggactttcaagaagtgatgtgatcagatccacctgtgagaaagatgcctttggctgcttcatggagaaatgactggagaggaggcctgccttagtgttgcagaggcaaagtaaagaacatgctgctgcagtgacccagcaaagaggtgatgggggaggaatcaggctgtgacaggggaagaggaagctgactcagtgtgtcccgactgcacagacctacatagtgaggcgaggccaggggctgcatttttgtctgagaatgatatttccttagctctctagagcttacagtgtcttttcgtttatgttatctcagttgatcttcctaaacctggagataacaggtcacatgtccttatgtcattcctattttatagaagatgaaactgaggttaagcaattagtcaacagacacagaatcacaggccctcttcattctaaagcaagggtccaaaaccttttttctataaagggccagagagtaaatgatttacgctttgtgagccagagagtctgttgtagctactcagctctgggttattctagtgcaaaaacagctgtaggcagcatgtacagaaatgagcataaccatgctccaacaaaactttatttacaggcactaacgtttaaatttcagacaattttcacatgtcacaaaataccacttttctttaaccacttaaaagtataaaaaacattcttagtttgcaggcagtacagaaagattttcggcccatgggccgtcattcgctgacccctgttcgagaggatctatcacagaagactcttgcttgcctgaaatttgtgagtgcatgtaaatgttggaattaacaggtgtcactgttttctcttatgctgtcttttgtcttcaggaacaaccaggaagacgctgcacttcgagatttccaaggaaggcagtgacctgtcagtggtggagcgtgcagaagtctggctctttctaaaagtccccaaggccaacaggaccaggaccaaagtcaccatccgcctcttccagcagcagaagcacccgcagggcagcttggacacaggagaagaggccgaggaagtgggcttaaagggggagaggagtgaactgttgctctctgaaaaagtggtagacgctcggaagagcacctggcacgtcttccctgtctccagcagcatccagcggttgctggatcagggaaaaagctccctggacgttcggattgcctgtgagcagtgccaggagagtggcgccagcctggtgctcctgggcaagaagaagaagaaagaagaggagggggatgggaaaaagaagggtggaggtgaaggtggggcaggagcagatgaggagaaggagcagtcgcacagacctttcctcatgctgcaggcccggcagtctgaagaccaccctcatcgccggcgtcggcggggcttggagtgtgatggcaaggtcaacatctgctgtaagaaacagttctttgttagtttcaaggacatcggctggaatgactggatcattgctccctctggctatcatgccaactactgcgagggtgagtgcccgagccatatagcaggcacatccgggtcctcactgtccttccactcaacagtcatcaaccactaccgcatgcggggccacagcccctttgccaacctcaaatcgtgctgtgtgcccaccaagctgagacccatgtccatgttgtactatgatgatggtcaaaacatcatcaaaaaggacattcagaacatgatcgtggaggagtgtgggtgctcatagagttgcccagtccagggggaaagggagcaagagttgtccagagaagacagtggcaaaatgaagaaatttttaaggtttctgagttaaccagataaatataaattaaaaaaacaaaaaaaacaaataaacaaaagtaaattaaaaacaaaacctgatgaaacagatgaaggaagatgtggaaaaaaatccttagccagggctcagagatgaagcagtgaaagagacaggaattgagaggcaaagggagaatggagtaccctttatttcttctgaaatcccactgatgacatcagttgtttaaatggggtatgtcctttccccccttgtggttcccttgtgagccttgagtcaactaatctagtctgcagtagtgcggactagagcaacccaaatagcatctagaaagccatgagtttgaaagggcccatcacaggcactttcctacccaattacccaggtcataaggtatgtctgtgtgacacttatctctgtgtatatcagcatacacacacacacacacacacacacacacacacacacacacacacaggcattcccacacattacatatatacacatactggtaaaagaacaatcgtgtgcaggtggtcacacttcctttttctgtaccacttttgcaacaaaacaaaacaaaacaaacaacattaaaaaattgagaacaagtatggaaagaatgaaagatcaaggaaaaaagaataccaagttacatttcgttaaggtgcttatgatcttagaactatgcaacctaataggtttgaaactgtttacctgagagagaacaaaaagagagacttttttgtattggaagtaatctgattaatttttattttcttcaaggagagatacttgaaaggaatatgtttgtccatctgttggatccaaacatttctatattttgtaaatgttgttgttgtttttttttaatcgtttactatttgcactacaatggtgtttgacctgtctaatccttatttaacaagtattttctttgagtgggggtgggggtggggtttaagagctgcacttaatgtgagctataaaagaactgctacagcacacaaaatagctatttttattattataattataattattattattattttgtaccttaaaaaatagacacatacaccaaagacatttgtgtgagcctttaaacagtctgtctgtggttggtatcattcaccatcaatgagtcaggggttgggattcaaggttgagtagtgtggattgtgttcaggcttaaaagacctgagaagtttggtttttgactccttttacatccatgaaacaggacatttcatactggatgtacagtagttgtacactgttggatatcaagttcaatcaaattcatggaactacatgcttgtatgtgtatatatacattgcttgtgcatatgcatatctgtatgtatatatacatgtattgtaccatgtccatacacattttaagcacttcaggctgtcatttcttaatgttcttaaagcaatgaatgtttgtgtgcaaaacacagtatttttaagaaggataggctatagtttttgcttttactctgaactaggtgggcacatttcaaaaattcggatgggaaaaagcctgaaaattccagtgaatattcagcaaggccctcttttgttgtacagggatcaaatttcctcctcttttttgtgccccctcccacttctacaagttttcccctatggggaaaacaggatgataatcaaaactctgggcggaagtttttccaacttagtgtctactggaatcaatcttaaatcagaagctttttcagaaaaatataatatttaggtcagaattagagttaagtgtatttttaaaaaatgattaaggcttggttatgagaaatattacctgtaccagctgggaaaaataatgtcaccactaactaaaagataattaatttgggagaaggtgttaagagagggagagtaaggaagagaacagttaagaagaggcagagatgagggcagtagtaaaaaatctctaaatttttaatttatcttcatgtgtaaatttgtatcgattcagatgcagagaggaaaaaaaaaaaaaacaacctttgttttataaatatcaaagtacatgcttaaagccaagtttttatctagtttattctagtatttagcttgcctagaatagctaataaattattcatgtatgtgcttttgaaaatacagagccttatttttacagacttgtgtgaagttggcaaatattttgaaaaaaggaaaaaggtttctaataattgggaacaattacattaattaatattttgtaaaatattgaagcttttagccctatgtcaatttgtagattaaaataaattaattataggaaaggaagatatcagtgagaaaccaaagattacaaaaggtggtttagctctccttgaaaaatatactcagttggtatactgtaacacttggctatatgtaggcaatgtcactacagggcaaatacacttactgtgttctagaggccgccctttcttatgcagaaaatacaatatgcactgcatgagaagcttgagagtggattctaatcaaggtctattgaccttggatatcatgcatgtgggaaggtgggtgtggtgagaaaagtgttaaggcaagagtagatggccatgttcaactttacaaaatttcatggaaaactggcagtattttgaactgcatcttctttggtactggtacctgcagaaacagtgtgagaaattaagtcctggttcactgcgcagtagcagagatggtcaaggatatggaaaaagcagaaatttgcaaagaaagctgatacccatgtatagttcccattcatctcaaatatatctgctacctttttaagctaagtcctagacatatcggggataacataggggttgattagtgaccacagttatcagaagcagagaaatgtaattccatattttatttgaaacttattccatattttaattggatattgaatgattgggttatcaaacacccacaaactttaattttgttaaatttatatggctttgaaatagaagtataaattgctaccattttttgataacattgaaagatagtattttaccatctttaataatcttggaaaatacaagccctgtgaacaatcaccctttcacctagcagcatgaggccaaaagtaaaggctttaaatgctaacatatgggattcttagtagtatgttttttttttgaaaccagggtggctctatcttagcttactatctcctcgctctttctctaaggctaaactctaggctcttaaaaatctgcccacaccaatcttagaagctctgaaaaggatttgtcttcaaatatcttttaatagtaatatgtattttatggaccaaattgacattttctatttttatttttccaaaaaagtcaggtgaatttcagcacactgagttgggaatttcttatcccagaagaccaaccaatttcatatttatttaagattgattccatactccattttcaaggagaatccctgcagtctccttaaaggtagaacaaatactttttatttatttattttttcaccattgtgggattggacttttaagaggtgactctaaaaaacagagaacaaatatgtctcagttgtattaagcatggacctatattatcatattcacttaaaaaaatgatttcctgtgcaccttttggcaacttttcttttcaaggtagagaaaaacttagtcaccctgaaaacccacaaaataaataaaacttgtagatgtgggcagaaggcttgggggtggacatcgtatgtgtttaaattaaaccctgtatcactgagaagctgttgtatgggtcagagaaaacgaatgcttagaagctgttcacatcttcaagagcagaagcaaaccacatgtctcagctatattattatttattttttatgcataaagtgaatcatttcttctgtattaatttccaatgggttttaccctctatttaaatgctttgaaaaacagtgcattgacaatgggttgatatttttctttaaaagaaaaatataattatgaaagccaagataatctgaagcccgttttattttaaaactttttatgttctgtggttgatgttgtttgtttgtttgtttttattttgttggatttttactctgtttttttgttttgttttgtttttttgcatactacatgcagttctttaaccaatgtctgtttggctaatgtaattaaagttgttaatttatatgagtgcatttcaactatgtcaatggtttcttaatatttattgtgtagaagtactggtaatttttttatttacaatatgtttaaagagataacagtttgatatgttttcatgtgtttatagcagaagttatttatttctatggcattccagcggatattttggtgtttgcgaggcatgcagtcaatattttgtacagttagtggacagtattcagcaacgcctgatagcttctttggccttatgttaaataaaaagacctgtttgggatgtattttttattttta

SEQ ID NO: 393 - DNA, 19939 bp, Mus musculus
  source 1..19939: mol_type = genomic DNA
ctcacagcaagctgctccccgggttcgctagtggctgctcctccaggcgagcacagggccagcatggagttggagctttgtgaagtagccagtaaatcaaaacgcctccgctaggtgcagagcgcagtggcaacgggccactctgccagtgcggtagtcggtgggaccgaactccacattcgagaaggggcagcctgcgggcgcggggcctgagctgccgctcgcctcggttggccgagagaccggcagccccactgcaggtccgggtccctgacattctctggcaccgagggctgggatcagacattcccagctgcactcactgaacagtgattttttttttttcttttccctccctgaattctttagctgccaaaagggggggaaaaatcaagagctgcgcttttaagcgaagttgcccttgctggtgttcagggtaaaaatagaggcggccacttggaccagcttggccctgagtccaggcgtcccgcgagccgggctggagctgcgcattcgggagtgatccctggaaactgccagcaggtgctgctcaaggtacggtggcaggctgaaaagggacagggcctgggtgcagggagtctccgcgggaggggcaggaaatgaaagagaaaccaacccagctcagagctgcgctgaccagcgcacgccctgggccctggaattcagctgggaaatgctgatcctcagcccagaatattccacagaagctattttaacctgcctgcttcctccaccacccccacctgaatttccacagaaagagagaaggctttcccaacgtggttccagctctaaggttggggggaaatccagcaacgtcatagctgctacactggcttagcaagcaggttggcacttcgtggtgtcaaaggccaacagggtcttaagagtgaccctgtgtgaggtggcccctgcagtcagggtctgaaacattcccatgacacacatgcttaagaaaccacggggatgctcagaaataacattcttttgtgaccactgagtttggatcctgaaattatacatcccactttagagatggaaacactgagtcttgagtttaaatgaggagagactcagagctggggtctgatccaggcacttttctgtgccacccagtctacattctacattctggtgcaagcacgactttccgtgaagttatgtgtgaggcaagaagtgagtgtagaccctcggagttcttatcaaacactgggaagggcctctctcccaaaggtttaagttcattccggggtcgaagtgcaattgatcatcactgatttttttttctgtctttgccacttatattcctgtcatcttcccctgcaactttattttctacttcagttctcttacttgtggttcttagactactcctctccccccccccccttccatccactttgttctcaatcacgagagaccctccagacagctcctggtgtcatagaggaaccttgcccacttcaaaccttttgctggtgggcatagtgaaaagtttattttattcatgttaaatccggcacacaaaacaacatatctggtcatatggcttttattagctcccgattttgcacattttatccgacttgtcatgagaacctggccagtgcttcagctgtactctttcctgagaacaagagcccctctttactgtgcttatcggagcattccttctctctatgttatctcactgccagtgtgacccaggccaaagaaaatcctaacctaactttccttctattttaaggagcgttcacttcttttcattaaactcgtatttatagtgtttacaaatgatagggcttgatgttcaagcttttaaagaaaagatgcattttgcgtgtgtgtgtgtgtgtgtgtgtgtgtgtgtgctattgttgtttttgctagttaggatgggactctaaagacctaggcataatacttatgaagttcacttgcagaagaagagcattttccaagtctgaggtgagaaatggtatatgaagccggcattcgatttaaaggtgtaattaatagtgtgagtcaaagcagggcgaccacggacatacagattttcctcaagaaaatagtttactgtagtcataattataaaactagaatccctatgaagaacactatgacttttctttgctgtggcaaaagtacggtgctttgcaaataggagtagttttatgaagtaacagatgttttatgtgtagacataaagccaaggctgattctagtaagaagtgggtatgaatagtaacctgtcagagctggacactcttggagatgtgtgtactcggttctcttatgtttgtaaagggtggactattcctagccacaggcttcactggctcaatgcatcacccaggtcgtgtctcagaagccaagagagatttccattagatagtgaattatgaaatgtctcacactggaaaaacgagtcatctgctgatgtcatgctgattctaaccaatcctaaacaaagccccagccctcctctttgagaggtaccaatgtgtgagtgtacaactaagtactacagtataaaacttcacagtgccaataccatgaagaggaactcagacagctctgacctcatgagacaagagccggctggcaaaacagaagggacccgaaaggtaatgcttttaaattcttgctttcgagttctctacacattaaaagtcagtgtggctaaaaggacttttacaactttttggcacctccataggcattgtaatttgtatcgtttttctattgtgcaagcaggttaatactgttttttaatagtcctagagcatgcaaatagattatgtgtttatacaacccactcagcacacatatacaagtacatatgccaaaaagaaagctatttttaagagttccatttgcaaacagtaaatccagggaacacacacatattcacatgcagagagaatccaaacattgataagttgctgttatccaaatgctactattaggactcttgagttgtttagagtcattaaacttttagctctatgttagtctgtcttgtaaaacttaactgtgctacaaaatgcttcgggttctgtatctgtaactccaaataggtgggtgatgttattagaacacaaagatgttctcctaaaccattgtgatgccagtgttcctacttccctcaggttttttttttaatgagagttttgttttaggtaatatggacagtcttaccaacaacagcagtgtccttggtgtttctggaggtgggagtcctcctagccctgcagaggtgtcagagggcttataaccaagaaagtcttgtgcattgctgctttggggaaagatagcatttgtgttgttcaggaagcattgttacctgtcaaaactggaagtttaacctagtgtcatgcttatctgaacttcttctccttgtatgtagatcttatgcttgtagttttgacccctattaactctgtcctcatgacctgctttgctagcctagaatactctgaacacagcgggtgtcaggcagaagggattgaatgtatctgcagaaaccagcgggcttatatgtagggaagaaactgagaaagaaggactgctataacagatggacaccttaaagatcttctgcacaagacagaacgaaaaggtggtgtgaagaattaaaaagaagcctcagaaaggcattgttttaagtgcacatttgtctcgttctctgaatactgtaatcctcaatgaactcggctctgctggtactttgaagagaaacaacacagccaggcagcctgccttgaatgctacactatggtcaaggctggcgaggggaggtgggcagcagaacaacaaaagtagtgcatgccagagaaaaagaatttcctggtatattttagagattcttgccctctaggctagttacattgtaagagtacattgtttttcatgaaaggatgtgagaaagaccaaatgaattttgtgctttatcagtgaagccaggacaatgggcagtgggctataatttctgagtatatgtgcatccagggtagagaaaggagatgcagggggcagggtgtgtgtgagagtaccttccctgtgtatgtaaattgctgcttgcccaagggagcttccaatgccctgttgtggtgcccacttggcaaaagcagagtgtattatatgaccccagacaaaagttgtgttgcgctccaggtcccataagatcgcctgctggcataaggaccctggacatttaaatatgaatgaatggcagaaaggaatggttctggattctgtcaggcagaacaaccagctgtctcaggcagcccctctgcctcagccccagcccccaaccaatctgaggacttccctcagacccatatcaaggtcaggtgggtgcttactccagggaagtacaagaccatgggagatgacttggtgccactttcctatctagttatctcagtgaatggaaacagtgcatttaatttccttggactcccccgccccccaaagaagaaaggtgaggcaagaaaaaggtttgagcagagaaagttgaaaagaaaaaaaaagtacaaaataaagaaagaaacccccagactaaaagtgaacagaattaggagaatttattgtagaaaggacggaagagtccccatcccccccagagaatggtaggattgggagagaggtgtgtgtgagggagcaaggagcagcgggaggcagcctgtcagaaacgggctgtccctcctccctagtcacagctcatactcacaggcgccctgcctcctccctctcccattcactcactcacataggaccaatccgcctctctctctctctctctctctctctctctctctctctctctctctctctcccttcctccctccctctcagtccctccctcccctccccctccttctctttctttctctctccctccccctcccttgctgtccctctctttctccccctttccctgtcttctttccccctctctcccttttccctgtctctccctcccatcctctctcagtctctgtctccccccaccctgtctcttccttcctccctccctctctccctccctccctctctccctccctccttccttctcttttactcggagacagtcagaactctcctccctgacagccacaaacctacagcactgactgcattcagagagggaacctgcaaacaaaacttcacagaaaactttttgctcttgttccagagaatttgctgaagaggagaaggaaaaaaaaagtccaaaaaacctgtacgtgaggggtggggaggaaaagcagggcctttaaagaaggcaaccacacgacttttgctgccaggatgcccttgctttggctgagaggatttctgttggcaagttgctggattatagtgaggagttcccccaccccaggatccgaggggcacggcgcagccccggactgcccgtcctgtgcgctggccacccttccgaaggatggacctaactctcagccagagatggtagaggctgtcaagaagcacatcttaaacatgctgcacttgaagaagagacccgatgtcacccagccggtacccaaggcggcgcttctcaacgcgatcagaaagcttcatgtgggtaaagtgggggaaaacgggtatgtggagatagaggacgacattggcaggagggccgaaatgaatgaactcatggagcagacctcggagatcatcacctttgccgagtcaggtgggtgctggcgttgggagtgggggcgggggcagggaaacgtatttcattgacagtcctagcaggaacttctttccctccagctcaagactgtccgggaaggttattagttattaggtggtgatggtggcgccggagaggcagaggagggggaaaaggacttctttgccagggatccctgccccgcgatggctagattacacttgctaaataaactcagcggtttcccagagaggaagctcttgggccagtctggagctggaaagcagtctgcttggggctccctgactgccctgcctagggaaccagatttgagcagccagttgaaaacagggcatttgggggtttgggggtgcagaggcagcatctggactccatccaaagtttttctggagtaggagtgagagtgcccgggggccgagtgcaaaggcactgatgatggctctgtctgaaaacaaatttcctttaaatgtgtgatctggggccacatttggagccagactctgggcatatttgttagtgacactcattttcacctctggaaagcctgactccatgcacaacccacccaagacagcagagagcagctcttagggcactgaattggcaattaatttcagaacactgaaactttggcttttaggacaaaaacaaaataaaagcaaaagcaacgaatgacaccaaccaaaagcccccctacccagttttattattttgtaaagtggctaagaactttttgacaaggaatgcaaccttgacagtgtgctctcagaccctatgctgaactactcagtccttaagaggaagaacttcagtggattttgatcattggcttaggaccacactaacctgttgctgtggggaaatagctgtgcaaagcccaggctctagcctgggaactggctcttcatacagtcaggaggacacagatctcactgcaagtctgtgggaactgggcactcagatgtttcagaacctctttactctcctgttaaatgccaggctaaggaataggatctcttgccaaagccatttgaaaggaatgccattgttttgtttgctagagcatatggctagtgaagtatgtgcagggactcccagcattttgtttaaaagtttgctgcagcagtataaacaattaaggaaacagtcaaaatttccaatcctgaaaacctgttgactcagatgttttgttttcaagaaaactgtgcaagacctgtgcatccttgggggagggggaaaggagacagctggcttggtggtttcctgtggagaagccttggtacccccaccagcttcctagacaggttagctctatctgtgtcctactttcttaactactagctccttcttgatacagttccccaaaccttggtcattgtgactttattttcgggaccacattgaggaaaaagacaggttggatttatcaggtggctatttaattttaatttttctttcacctctcgtagtgggaaggtaagaaagaaagtctttacaacattggttggtgtgtgagggggatgggttccccgtcttaggagattggccctggttctgacaaaaagtgactcacatacaagcttttatgtacaagcttccccttatgtaggccacaattgcagcttctactaacttggaatcaactctatcatatgactaagtctatgtgtgacttctgccatgtttaatggcacagtgaatgttagcactctatccttccctctgatttactagactatcacttggcagttaaaggtagggccaagaattgggtcattttccttttcttcttacttatgaccttctcaatgctaatggctctctcagttaaatgggatcctgtcatttttttgcttctctgttgtttagtttgagagaaaataagccaccatttatatctgtgattcactgggctcacacattgactgagtataaaatttgtaagaggaaacttcttctagtccaggaacacggtatttttgttaacattgcttattttctcttgtgagaagtagaacacactgacttcaagttgatttaatataatttcacagatgcaagtaagatcatagtgtagacaacctactctccaagtagcgtagggtatgacataagcatgtgacctattcaggaaacatttattatttgattagctagagaaaatgtatgaaaatgaactgcaaagatctgtcttcttgctttcgggacaatcctattttgctatgtagtaatcaacacatttcaagaatagaaaagggcgaattttttctcttctttacaaccatttgtagaacatagagtacagatggtgaatgtcacctgtaaacacactacagatgtgccttttaatagcaagatccctggtatggaaatgtatgttttctttggcctcttcactcaagattattagataaggctgataaaacatgaaactaaaggtatgtaagggctatggttccttgaccttttaagtgagtttttcctgtgcccaggtgggaagtgttttgcatttgctaagttgatttgaattgcattggttgaacagcaggtattcacgctcaagggctctgaaatctgtcccaataagtgaaattgattttatttttaaaggagcaccatcctggtcctccccaaagttagtgtattcactgcatggctggccctataccattactcctcatttttcttcagaggagcagcagtatggatgagtgaagctgatccaatgaatatgacctaaattgtcaatgacattgagatctgaggccttcttggctgatgcactgagttttatcgagtttccttcattgtagtaggtgctcagtgaacgtacagtaacggcctgccattgagtctacatgaattgtagcatggtcagccactgactttcacaattagcttactggagtgcttgctctataggatataaaaacaatagaagtgatgcctgcatagatagatactgcccaggtattgtctaaagtgcctactctcttggaggacactaggtacagaaggcttgaattagacatgggctcacctgaaaaccacttttccacacccaaagaaagccatctgcaagtggagtaaacactgagagccccattcccgcctttcttttgacctgtcttgtgagttacacttctctgaacctctgaacctttaagattttcacactgaatctgaattttaggaaagactggccacaagagggcgcctccctaaatcctcactgctctcagccagcgtcactctgagcaaggcagttttgtggctacttgaagtcacggcctgtagcaccttaatcttgaagaatatcagttacttcctcccacagccatacctttcggcagagttaagatttgataggctgggaggtgcacagctacctgtaaacattgagacagaggcacagcaacggaagtactggggttcacaggaacattccacagctctatgggcagcaaaggagtgatgcctttcaaacacaaacaaagcagggcttggggtgtgtgcgtcgtcagccacaccaatgagagcgcagtcgttccctaatacagacgcccaggttttacagaatcatctttcatctgccccaaatccgcttcctagtttgcctgccttatcagtgcttttcacaagggacaaatgacaagtgacttccaacagggagacaaaagagactatttatttaacgcctggtaggaacatggagttcagctgctgagggacgcattcgtttcccagctgagagtgtggaaagaaaccgtggtgggggaaggatgtgcaaagagatgagcacagggattttgcttgaggagtgggtggactggagtgggaatggggagatatcaggggagagacgcagttttcacatagagaagaaatatcttcccaggcgtttcgcatgaaaacacttatttctcttggcccttcttatatcaaacttgagcatgatctcttcactttagttcagaattcttcatgcttcactggttcctgggtccaaaattaaaagtgtaaaagttttgaggaactctagaaaatgactcttgggttgaatcttgaaaatttttttccagttatattatgaagtaagcttctttttttttgttgttgttgttgaacatttaacccttttttaatcattctttaaatggaagaggcaatggatgataaattactaaggcccgaagagttacaataattaaaaaatggatcctgaagacaggtattaaagctaaaggcttagacagaataatttatacaaacaagctaatatgcctgcaatggtaagattctttactataggccaaaggaaaaataatctttcagatcttactggctgccttctgcagaaacctctggaagccacccagaggccaacttagtgcctgagagaacacacaggctgtaatgcgggcccttcatgctactgactgtaatctaggcacagggaaacttgatgaagaatggaaaatgtaagtaacatattttacagcagagctgtgctcccctcatggtgagtttaaatgtgcactgtgaatggcgaggctttttacattaacagaaacgtcattattactgatttgtgaaagggcagcatattttacccaggatgttgatgaggaaaagcaggctaattaagctgaaactttatgtgtatactgatcatttaatgggaaattattatatacctcacaaatctgagaccaggactttgtgtatgtggaatttgcataccaatgttaggaaggaggctaggagcctgtttacttaagtcctggcatacgttcatgatcaagctagtgagaacccaggagagcaaaagagaattgctacaaacatccttcttttaggcttatgtagactttctgtcagcgccccccacccccaccaggcagcatttcaaaggtattctctatatggtacaaaatttatccctactgaatgttctgcccattttcttctgctttggtgtgtgtccaccaagctcacaggggcttcggtgatgagaaattatcacccacatgggtttgcgtgggactttcaagctgagttactcagacagagcaggctgtgtgatacaagccttgctcacaagcctcaggacaaaaaatagcacagaggaggaaaagaatgttaccagggagtagttaatgaaaggttacaagcaggcagccgtagctggggagctgtggccttgtggagggagccagcacacacctgtacacaccagcgcagtgcctgcttactcagcattatgggaaggccgtcacgtcaggattttacagcaccagatacttaaatcaggtctgaaacggatgggaagttgatcctaaacatctcatccttagatatctttcttcctttttccaaatcatcacatgtttagcttggggcctcctggaaacaccactgcaatagagtaatttctcccagataaaggggatagaacatttataattacatttttcagccttatgtaagtaacctgagagtggtaatctatttctgaaaccaacaggtctgagaaacggtcgaatctacttcagcttccaacctcctcactcccccccaccccccatccccttctgcaatgaaagctaaggtaaaagaaaaaaatgcactgcttaataagtcagaatacaatagaacttgtaaactgtacctggacatgaggtagatggaggaagacctgactctctcctccccctgtcctcccgggcatacggcaacagcattttcatgaaattggatctcagttttattttttttcctgataaaatatcatgcaatacacaaatagcagttccagaaatggacaccaggagaaggaggggacaggcatgtcaattagtaggggaaaatccaaatgtcagaaatatgggggagagatgaagcgagctaggatggatacaaatccagggagcagaggctttcggctggataattaaactgcagcagaaatcagcgctcttgcctcccgtgacacataggcaaatgtcttgcagctaattgtcagccaagaccagcctgaaagtcattttatgacgactctctgagcctaatgtaacaacacctgacagaccgagccccctctaatgagcactgtctttgtacgatcctcttgcagaaacactaaatcatttgcttgcaagtacagccgcctgtgaagaaggggtggggctaccctcgtgccttagaaacttgttcccaggaaatcaggggccatcctgtaggctgtgtaactggagcacatggcctcagtcttgctggccatgataaaaatctgttcctatgcactgccacttgttctagcatgccactgaatcctctcttgtccctactgcagcatctgcagttgtcagccaggaactgtttatggaaagcccagtgtgagcaagtcagcaccctttgtctgcccccttaccctcagggggcagaacagagtttgggaggaggttgcctgagatctagtgagacctaggcagtcaggcaggagctgcttcctagagaaaaggcacatcctccattggctcctttaatttggctgctacttttggtttctgtctgtggactgaaaccttgagtagctcagaatttcagaaggggttcctgcctagaggcaggaagggaaaacaataggtagctaggtgacattttctccaaaggtagtagcctcccattctgggaaggaacctgtgctgtcccaagccctctttagcctatccctcctttgccccaacctctctggatcactctgccctctggtaccttaccacaggatctgctgcaattatcatcttagattttcttcctagagcattttactttctcataaaaacaaacaaccaacaataaactcactcaacctttgcaaggggtgagataggatttcactttaaaagctattaccatgtttctcttcctcaccagtccttgcatttatatgctatggaataaatatatcctcttaattatttattttaatgcctaacaaaaatgtgaagtcactcagagaaatgcccctatactccatcttttagatagatgccagggggcttcgtgaattgatcagtattgtagacacactctagagagtgggttaaattgagatgggaatctgcagtgtaccatgcacaggaaagtcttccttctgcctcagagcatttgaaactgcattgaaatttatggtaccagagcatctgaaagtctctactgatgagtatgtctggatttctgtaagctatgggaatccacttaggccaacctttctagggagttgtgatgtcaaagatgaacttgaagaatgttccttgattgtacgtgtgatccatgtacgcagacaagtagggatgcgatcaagtaaaaggcagcaagcttttatacaccttcccagcactcatgtggaaatgaagggaaaggcatacttcatcaaagaattctgcttcttactgaaaattcttgttcttttgcgtttcctatttgtaaaagatactacgtaataaatctacaagtgtctgggcaaagaaaagaaaatatcaagtttctagctctataactaggtagatctgagtagttgctgggatataggctgttttaaaagcacatagagagtggagcatgcttttggtattgatttgatggattctagatgaactgaggcaaaaataagggattcagagataagagttgctttcttaatgtaaggctgttcaatgctaatatgctcccacttgttaatcaattgcctacctctgatgcatgctacagcatgacagagaatgggacaggacatacaatcccgaagccctcaggtgtccttaactgaattgatgtgagactggtaacaggtgaggagaagggaagaagaggaaagtaggagtcagttggataacagcattgttttggctgcactcgatggcacaggaatagtcagtgtccctggtacaagggggtgagttcataaagttcacaggaagaaaatatgtaggtcacagggacacagacctatatgagatgcacagtgcaatgtcatgggaagtttggatattgaaaacaaaaggttgtaacagaggggacagtgcaatcagacccacttttagggaagatttcttcaactgcttgatggaggcatgacatgagaaagtcttgacttaagtcttcgaaggcaatttggtgaaaaaccctctgctgtagtgggggacaggttgacagaggagtttggtctagtggtgacaggaagaagacatgtgtcagagaatgtgacctactgactcacaagtagatacaaggttttgggcttttgtgagaaaataatcccttgccttgctcaggcttcccggttttcttttattgggttctgttagccctttgcagcccagagatcactgctcaaatgttgactcacctttcttattccctgaattaaactaaaatgaaggagtgaatgaaacagatgcagaagcccaggcttccttcatcacagagcatggtctacaaatttgtctctgttagtcatgtctcctatagctactcaattctgtataagtgaaacaaggtcacaggcaatgtattaagaaatacgcttaactgtgttctggcaaaaccatacaaacaggcactaaaggttatatttcaggttaagtttcacgtgtaaaaaatatttattgtttttcttcaaccattttcatacttcaaaacctttctcaattcagtggccacatggaagcggatttatctcatttgtgggctctaaattgctgactgaacactgtgtgctatacctgagaagagtcttgctgctggaagttagtgataggtgaacaatttagagttaacaggtgttctcatctctctctctctctctctctctctctctctctctctctctctctctctctctctctctttcttccctttcttgtgttttgtctttaggcacagccaggaagacactgcattttgagatttccaaggaaggcagtgacctgtcagtcgtggagcgtgcagaagtctggctcttcctgaaagtccccaaggccaacaggaccaggaccaaagtcaccatccgtctgtttcagcagcagaagcatccacagggcagcttggacatgggggatgaggccgaggaaatgggcttgaagggggagaggagtgaactgttgctatcagagaaagtggtagatgctcggaagagtacttggcacatcttcccagtgtctagcagcatccagcgcctgctggaccaggggaagagttccctggatgtgcggattgcttgtgaacagtgccaggagagcggtgccagcctagtgctcctgggcaagaagaagaagaaagaggtggatggagacgggaagaagaaagacggaagtgacggagggctggaagaggaaaaagaacagtcacacagacctttcctcatgctgcaggctaggcagtctgaagaccatcctcaccgcaggcgtaggcggggcttggagtgtgatggcaaggtcaacatttgctgtaagaaacagttctttgtcagcttcaaggatattggctggaatgactggatcattgctccctctggctatcatgccaactattgtgagggtgagtgcccgagccacatagcaggcacctctgggtcctcactctccttccactcaacagtcattaaccactaccgcatgaggggtcacagcccctttgccaaccttaagtcatgctgtgtgcccaccaagctgagacccatgtccatgctgtattatgatgatggtcaaaacattatcaaaaaggacattcagaacatgattgtggaggagtgtggctgctcctagagttgccaggtcccagagcaaatggatctagggtgtccagaaaagacagtggcaaatgaagaaaaaatatataagatttctgaactaaacaagacaaccagaaaaatagaaataatagtaataaaaaaaaacccacaaaaaaaaaactaaactgaaaacaagacctaatgaaacagatgaaggaagatgtggaaaaatatcctaaggcagggctcagagatgaagcagtgaaggagacagggatttgggggagaagagagaatggtgtacccttcatttcttccaaaaccaaactgattgcatcagtttcatccaaactgggtattgtcctctctcctgcctcttgcagtccccgtgcgagcctggaagtctacttgtctattctgcagtaatgtgggttagcacaacccaaataacgtctagaaagccatgcgttttaaagggccagtcccacccagttacccaggtcataagtatgcctatgtgacactatctctatgtatttcaacacacgcgcacacacacacacacacacacacacacacacacacacacacacacacgtacatacacacacacgtacatacacacagacacagaggcatttccacacaccacatgcatacacataccagtaaaaggacaattctgtgcaggtggtcacattttcttttctgtaccacttttgccaccagacaaaaccaccataaaacattgagaacaagaatggaaagagtgaaagaccaaggtaaaaagaataccaagttacatttcgttaaggtgcttatgatcttagaactatgcaacctaataggtttgaaactgtttacctgaaagaggacaaaaagagagacttttttgtattggaagtaacctgattaatttttattttcttcaaggagagatacttgaaaggaatatgtttgtccatctgttggattcaaacatttctatattttgtaaatgttgtttttttatcgtttactatttgcactacaatggtgtttgacctgtctaatccttatttaacaagtattttctttgggtgggggtgggggtggggtttaagagctgcacttcatgtgagctataaaagaactgctacagcacacaaaatagctatttttattattataattataattattattattattattttgtaccttaaaaatagacacatacaccaaagacatttgtgtgagcctttaaacagtctgtctgtggttggtatcgttcaccatcgatgagtcaggggtacagatgtaaggttgagttaagtggattgtgttcaggcttaaaagacctgagaggtttgggtttgactcttttacatccatgaaacaggacttttcatactggatgtacagtagtgtacactgttggattatcaagttcaaattgatgagactacatgcttgtatgtgtatatatacattgcttgtgcatatgcatacctgtgtgtatatatacatgtattgtaccatgtccatacacattttaagcacttcaggctgtcatttttaaaatgttcttaaaacaatgaatgtttgtgtgcaaaacacagtatttttaagaaggataagtgatagatttttttcttgcttttactctgtattacgtgggtacatttcaaatattaggatggggaagagactgaaaatcccaatgagtatccagccaggccctctataaatgtacaggatgaaatccccctctttctcacccctgctccctacaagttatcccctgtggggaaaaatgggatgttactttaaaaaacgggctgattttttttcaacttatatttattatttattggaatcaatcttaaatcagaaacgtttttggaaaaaattgttaggctagaataatttttttgaatagtgtggttactacttaaataataaaagaaacaggaacgtatttaagacagcgggagtcatggaagagagcgcttaggagccagggagtggggtagttgtacaaatctctaatattctattttacagccaaaaatcttgatgtgtacatttgtatttttcagaggcaaaactgaaaggattgtcttataaagatcaaaataacacctaacccaagtttctaatttagcccagtgtttgcttgtttaaaagaactaaaaaattattcatttatgtatttaaaattacagagccatatttttatggaattgtttgaaattcgaaaaactttataaaagtgaaaaactctaattaaaaaaactatattcctcagtattttataaaatattgaagcttttagcattaagtcagtccatagaataaagtcattgcaggaaaatgaaatacaagggagaaattaaatctttcaaaagctgatttaattcttaaatataaactaactcaatatgtattaaatatcctgtcaacatactttatcacattaggctgtatgtaggcaaactactttagtcttgttactgggcaaacatatttactgtgttccagggccctccctgtcttatgcaggaaatgcttgtactgcctaagaaatggattataattaaggtctaatgacctcagagatctcccatctggggacagatggcatggtgaggacacattgaggggaggtagatgtccaggttcagctttgccaattcttatgaaaaaaaaactttagggccctctgaactgtttctttggcactggagcctatagaaatagtgggcagagatctaactgtgccacagcagagaagatcttgaccatgggaatagcaggatttgtgaaactactaattatagttctcattcacctgagacgaatgtgcaatcttcttaagtcctttaaattctagatgttttggaagtaagcttgggcttaattagtaactgtagtaactaaatctagaaagaaatggaattccacaagacagtgtatttactggaggtcaaatgacttggttgtcacataaacttcatcggagctcatcaaatttgtatggccttgcaatagaatttaaatgctaatatttaaacaatattagatattattttgctatagctaacaatttagaagacacagagtcttgtgaacaactggtctttttacataagtgcttagtccaaaatttgaaaagcttttatgcttaagatattagtttcttcatgctgtgctttccctagagttagagtggctctgactggtctccccgctttctcaaggataattcttaaacacctgcccacacgaattctagatgctttgaagggcatttatagtcagtacctctttaaacattaaatacttgtaaactcaattgacacttttccttcccaaaataagtcaaatttcagcacaacgatggggatgttcttatcctagaggactagccaatatcatgttcatttaagattgattccacactctattttcagggagagaccttgtgttttcttaaaaggcagaataagcaaaattgggtgatttgccagactgaattcaagaagtgactttatgacttccgaacaaacatgccacagttatagaaatgtgcattgaaatgattgtgtcacttgaaaagtttgatttcctgtgggtcttttggcaatttctctttttaatatagaaaaaaaaaccataatcacccccaaacccgcttaagtgagacttgtagatgtgggcaggaggtttggggatggacattgtatgtgtttaaattaaactctacatcaccgagaagctattggatgggttagagataatgaatgcatagatgctgttcacatcttcaagagcaaaagcaaatcacatgtctcagctatattatttatttttatgcataaagtgaataatttcttctgtattaatcttcagtgggtcttaccctctatttaaatgctttgaaaaacagtgcattgacaatggttgatatttttctttaaaagaaaaatataattatgaaagccaagataatctgaatctgttttgttctaaaaccttttatgttatgtggttgatgttgtttgtttgttttttttatttttattttgtgagttcccttgcatacttcatgcaattccttaaccgatgtctgtttggctaatgtaattaaagttgttaatttatatgagtgcatttcaactatgtcaatggtttcttaatatttattttgtagaagtgctggtaattttttatttacgatatgtttaaagagataatggttggatatgttttcatgtgtttatagcagaagttatttatttctattccattccagcagatactccggtgtttgcgaggcatgcagtcaatattttgtacagttagtagacagtattcagcaatgcccgatagcttctttggccttatgttaaataaaaagacctgtttgggatgta

SEQ ID NO: 394 - DNA, 5434 bp, Macaca mulatta
  source 1..5434: mol_type = genomic DNA
atgcaaaaactgcaactctgtgtttatatttacctgtttatgctgattgttgctggtccagtggatctaaatgagaacagtgagcaaaaagaaaatgtggaaaaagaggggctgtgtaatgcatgtacttggagacaaaatactaaatcttcaagaatagaagccattaaaatacaaatcctcagtaaacttcgtctggaaacagctcctaacatcagcaaagatgctataagacaacttttacccaaagctcctccactccgggaactgattgatcagtatgatgtccagagggatgacagcagcgatggctctttggaagatgacgattatcacgctacaacggaaacaatcattaccatgcctacagagtgtaagtagtcctattagtgtatatcaacagttctgctgactgttgttctagtgtttatgagaaacagatctattttcagtctcttttaacaagctgttggcctgtatgtaagtagaaaggaaaagagtttctctttttcaagatttcatgagaatatattgagacaaaaatctgctgcattatttgttttcttatagagacaaaaagctaaaaaataaaacacttgcatagcattagtttaataaggaaaatatagatagcatgcttatgctttcacagtaataccaccaaggcaaggactgagagatactacaagcaatgttaaaaacttacattaaattttataattatatttggttgtgtaaaataagtttttttcactaataacagaaaaaaaagaaacttgctggatgtttaagcttacttgagcactgctgaaaacctaaagtgatttctgttatttgaaactcttacagtatttttttgttcttcacagttaaaaatttaattttgaaagctattacagtaaagagtatgacaaattaaatatcttaatgtattagtaagaacaacaatgaagtaaacatagcataatcatcatcatgaactagatattagaaaatgcctaagaaataaacattttaattgcataggttatggctcacaaagtcctccttgtaccttgaccatagtactattgttgagagtacccagtttgtgtacttccaagcaggcatagtgccgaataaccttctaaaatattttattcttcctgagagggagggcttttacctgtagtatctacattgcttgtgacagatgacatattgcatacaattccatttgcagtcagttcaaaagaatactttctccaggaaagagaaacaggcaccttgacagagaaggcatggcaagaaaaattttgtgttatctgttattttgctttaatacaatgctttatatactttaaacaagattcaaaacagttttaaaatattatttcccttattaaggaatcaggttatgatgcagcaaagaatttccatttaagactctgctatcgaataggtctggagtagatttaccttttatagacaattttggaaaaccaaaataaaggaaattgttagtgcttgtgcttacatgacagcctggcttcctaaagacaatactttggaacttttgagatagcctgaatataacatcaaaatttttgtgtgaattacctgcttagttttgctcgtttaaaaggctattccaaagccaaaatgtaacagatgtattatgttttctactaattcccgaggctcagtaagttgctcagtgtgtcttgtccccaggtaattcaggcctgggggaagggttccttcttccagactgattggtacagctgctcagtaagtgtaactactcagattcccaaagaattctaagtggttgttcctccacagtgactcttgttctctctaatcatcatcattttaaaatttcattcagtgttcatgacttcatagaaccttcctttgtccatagttctctggaaggggaatagattcctgatgaacagctgaaaatacatacatctgaaaaattctgaaaagctagggtaattattttctttcacattttttgctgagttataaagttccacacagtatttcattttaaaagactgcataggcatacattatcttaatttttttttaaatgctcaactattaatatggaggggttttgttagtgggaaataatttcagtaactcttcttttcttattcatttatagctgattttttaatgcaagtggatggaaaacccaaatgttgcttctttaaatttagctctaaaatacaatacaataaagtggtaaaggcccaactatggatatatttgagacccgtcgagactcctacaacagtgtttgtgcaaatcctgagactcatcaaacctatgaaagacggtacaaggtatactggaatccgatctctgaaacttgacatgaacccaggcactggtatttggcagagcattgatgtgaagacagtgttgcaaaattggctcaaacaacctgaatccaacttaggcattgaaataaaagctttagatgagaatggtcatgatcttgctgtaaccttcccaggaccaggagaagatgggctggtaagtgataactgaaaataacattgtaataaccttatgcttttattcataatatgaataaacaatagtggaaaatagctacaaattccctaagctcataagccagacaaaggtatcttaccccaacggtagccctgtacccaataaaagtaggtgtccaatttcatatcctatgaaacactcctttgatattcttactttgcatgaagattttagaaaacaattataccatacttcttaacttcttaagaagttcttttgaattgggaatgaaatataaagtacttttcattaatatgatacatgactgtatgaattaaaatattaactctatataatggattttattacatatacaaacaattcaaaaacttttttttctcccagaagggtgccaaatgtgttaaaaatttttggcttagcaaaagcagataaaaaaaaaacttttaaaattataattaaaatgttttattcagagaaattaagagtgatatttataggcttacattttattaaatatatttaagattcctcatgataaatatgttcattgtttgtaggatgttgatgcactgatgtgtgtatatatttctttgtggaatactcctaataaaatttcaatttacaggctggtttacttttgccaccttatttctgccagcttatttctgagctgccttagcattcttatgcaaaagtttacttacagaaggccaattaacttagtatcaggccaagtaaatgacaataccatatatattataaaatttaataaaaaccattttaattcctagtacaaatttagggttactcttctggcctacctacatttctgtttacttctgttttcaaatacttaatgtgatcacatctttttacattcatctattgacataatttacaaaagaagattatacttacaaacaacaaacttgttaccttcgtaatctttcaatgatcttagttataaagatgaaataattagcagatcagaattactttaaataaaacattctttaaaatactatacaatattttttattttttcatctttatttacttttttaattatatatatgtgtacatacatatatacacacacacacatgttttacttcaatatgttgggggttcaagtggtttctggctacatggatgaattgtacagcggtgaagtctgagattttagtgcacctatcactccaagtagtgtatattgtacccaatatgtagtttttaatccctcatccccacctccccattctgagtctccaaaataccttatactactctgtatgtctttgcatacccatagcttagctcgcacttataagtgagaacatatggtatttggttttccattgccttcgaataatggcctccagctccatctaatttgctgcaaaagacattacttcactcttttttatggttaaatagtattccattgtgtgtgtgtgtgtgtgtgtgtgtgtgtgtgtgtgtgtgtgtgtatatatatatacacacaccacattttctttatccattcatccgctgatgggcagttagtctggttccgtatctttacaactgtgaattgcgctgtgataaacatacgtgtgcaggtatctaaaagactatacaattttctaaatgatctagtttcctttatatatgctactttaaatgttaaggactcaaatgatattattatttttgacagtcttaaataatactgccagagctattttcatttagatatggattaaaaactactgtcaattatttaagaaagtgttccttttcataggtagcattttaatgatcaaaattgataatatgaccagtggttaatatgttgtattcctcagatattttcatgtaaagggaaacaaagtctcaaatgcattaaaagactggggcagagacagaaccaagaaattttaaaatatctgaatagaaacattttccagtgaaagaattaaggagatatcatcatctcttcttctgaatttgtccttccctatttttccctggctttattgttctagttttcctgagtgaagacctagagaatggaggatggatgactatacctacccctccaggagttaccaggcatatttagccaatatatttaatcaggaagcaagaagagagggagctcagctctttccttcattcccctcttctccttcttctcctctctctcctgtccttccctccctttcttcccataaatattttcaggacatccactatgtgccaggcagtctggtactcaaacttggaaaaataaaaattaaaaagacatggaactgatctcaggggaatttgtatttctgttaaattcttttgagacataaggggaaaatcaagtctagtgtaaattaacattccttaatgctgtgccttttaaaaataaatgtggtatgagcaaaattattagtttatttcttcaacaatgacttcttaaggcaggtagaaaagtgtttccgggtctattgacattactgattgtcctttccttttcaaacagaatccctttttagaggtcaaggtaacagacacaccaaaaagatccagaagggattttggtcttgactgtgatgagcactcaacagaatcgcgatgctgtcgttaccctctaactgtggattttgaagcttttggatgggattggattatcgctcctaaaagatataaggccaattactgctctggagagtgtgaatttgtatttttacaaaaatatcctcatactcatctggtacaccaagcaaaccccagaggttcagcaggcccttgctgtactcccacaaagatgtctccaattaatatgctatattttaatggcaaagaacaaataatatatgggaaaattccagccatggtagtagaccgctgcgggtgctcatga

SEQ ID NO: 395 - DNA, 5333 bp, Pan troglodytes
  source 1..5333: mol_type = genomic DNA
atgcaaaaactgcaactctgtgtttatatttacctgtttatgctgattgttgctggtccagtggatctaaatgagaacagtgagcaaaaagaaaatgtggaaaaagaggggctgtgtaatgcatgtacttggagacaaaacactaaatcttcaagaatagaagccattaagatacaaatcctcagtaaacttcgtctggaaacagctcctaacatcagcaaagatgctataagacaacttttacccaaagctcctccactccgggaactgattgatcagtatgatgtccagagggatgacagcagcgatggctctttggaagatgacgattatcacgctacaacggaaacaatcattaccatgcctacagagtgtaagtagtcctattagtgtatatcaacagttctgctgactgttgttctagtgtttatgagaaacagatctattttcaggctcttttaacaagctgttggcctgtatgtaagtagaaaggaaaagagtttctctttttcaagattgcatgagaatatattaatgagacaaaaatctgctgcattatttgttttcttatagagacaaaaaactgaaaaataaaatacttgcatagcattaatttaataaggcaaatatagatagcatgcttatgctttcacaataataccaccaaggcaaggactgggagacactacaagcagtgtttaaaacttacattagattttagaattgtatttagttgtgtaaaataagtttttttcactaataacagaaaaaaaaagaaacttgctggatgtttaagcttacttgagcactgctgaaaacctaaagtgatttctgttgtttgaaactctctcagaaatttttttgttcttcacagttaaaaatttaattttgagagctattacactgaagaatatgcaaaaattaaatatcttaatgtgttagtaagaacaataatgaagtaaacatagcataataatcatcatgaactaaatattagaaaatgcctaagaaataaacattttaattgggtaggttatggctcacaaagtcctccttgtaccttgaccatagtactattgttgagagtacccagtttgtgtacttccaagcaggcacagtgcttaataaccttctaaaatattttattcttcctgagagggagggcttttacctggggtatctacactgcttctgacaggtaacatatttcatacaattccttttgcagtcagctcaaaagaatcctttctccaggaaagagaaacaggcaccttgacagagaaggcatggcaagaaaaattttgtgttacctgttatcttgctttaatacaatgctttatatactttaaacaagactccaaacagttttaaaatattatttcccttattaagtaatcaggttacaatgcagcaaagaatttccatttaagactctgctatcaaataggtctggagcagatttaccttttatagacaattttggaaaaccaaaataaaagaaattgttagtgcttgtgcttacatgacagcctggccctaaagacaatacttttgaacttttgagatagcctgaatataacatcaaaatttttgtgttaattatctgcttagttttgctcctttaaaaggctattccaaagccaaaatgtaacagatgtactgtgttttctactaattcccgaggctcagtaagttgctcagtgtgtcttgtccccaggtaattcaggcctgggggaagggttccttctaccagactgattggtacagctgctcagtaagtgtaactactcagattcccaaagaattctaagtggttgttcctccacagtgtctcttgttctctctaatcatcatcattttaaaatttcattcagtgttcattacttcatagaaccttcctttgtccatagttctctggaaggggaatagattcctgatgaacagctgaaaatacatacgtctgaaaaattctgaaaagctagggtaattattttctttgacatttttttgagttataaagttccacacagtatttcattttaaaagactgcataggcatacattatcttaattttaaaaaatgctcaactattaatatggaggggttttgttaatgggaaataatttcagcaacttttcttttcttattcatttatagctgattttctaatgcaagtggatggaaaacccaaatgttgcttctttaaatttagctctaaaatacaatacaataaagtagtaaaggcccaactatggatatatttgagacccgtcgagactcctacaacagtgtttgtgcaaatcctgagactcatcaaacctatgaaagacggtacaaggtatactggaatccgatctctgaaacttgacatgaacccaggcactggtatttggcagagcattgatgtgaagacagtgttgcaaaattggctcaaacaacctgaatccaacttaggcattgaaataaaagctttagatgagaatggtcatgatcttgctgtaaccttcccaggaccaggagaagatgggctggtaagtgataactgaaaataacattataataaccttatgtttttattcataatatgaataaacaacagtggaaaatagctacaaattccctaagctcataagctagacaaaggtatcttaccccgacggtagccctgtacccaataaaagtaggtgttcaatttcatatcctatgaaccactcccttgatactcttactttgcatcaagattttagaaaacaattatgccatacttcttaacttcttaagaagtccttttgaattgggaatgaaatataaagtgcttttcattaatatgatacatgactgtatgaattaaaatattaaccctatatagtggatttcactacataaaccaacaaatccaaacattatttttttctcccagaagggtgccaaatgtgttaaagatttttggcttagcataaaacagataaaccttttaaaattataattaaatgttttattcagagagattaagagtgatatttataggcttatactttattaaatatatttaaggttcctcatgataaatatgttcattatttgtaggatgttgatgcactgatgtgtgtatatatttctttgtggaatactcctaataaaatttcaatttacatgctagttaacctttgccacctagcttatttctgagctgccttagcattcttgtgcaaaagtttactcagggaaggccgactaatttagtaccaggccaagtaaatgacaataccttatatatcacaaaaattaataaaaaccattttaattcctagtacaaatttagggttactcttctggcttacctaaatttctgttttcaaatacttaatgtgatcacatctttttacattcatctattgatataatttacaaaagaagattatacttgtaaacaacaaacctgttacctttgtaatctttcaatgatcttagttataaagaggatataattagcagatcagatctactctaaataaaacattctttaaaatactatacaatattttttcatttttattacttttttattatatatgtgtacatatatatttatacacacacacacatgttttacttcaatatgttggggggtacaagtggtttctggctacatagatgaattgtacagtggtgaagtctgaggttttagtgcacccatcactccaagtagtgtatattgtaccaaatatgtagtttttaatccctcatccctttctgagtctccaaagtaccttatactactctgtatgtctttgcgtacgcatagcttagctcgcacttgtaagtaagaacgtatggtatttggttttccattcccttcgaataatggcctccagctccatctaatttgctgcaaaagacattacttcactcttttttatggttaaatagtattccatggtgtatatatactacattttctttatccattcatccgctgatgggcacttaggctggttccatatctttacaactgtgaattatgctgcgataaacatacgtgtgcaggtgtctaaaagactatacaattttctaaatgacctagtttcctttatatatgctactttaaatgttaatgactcccaaaatgatattattatttttgacagtcttaaataacactgccagagctattttcatttagatatgggttaaaaactactgtcaattatttaagaaagtgttcctttttataggtagaattttaatgatcaaaattgataatatgtccagtggttaatatgttgtattcctcagattttttcatgtaaagggaaacaaagtctcaaatgtattaaaagattggggcagagacagaatcaacaaatttttaaatacctgaatagaaacattttccagtgaaagaataaaggaaatatcatcgtctcttcttctgaatttgtccttccctattttgccctggctttattgtccaagttttcctgagtgaggaggatggatgactatacctaaccctccaggagttaccaggcatatttagccaacatacttaattaggaagcaagaagagaggagctcagctctttccttcattccccacttctccttcttctcctctctctctcctttcttccttccctccctttcttcccatattttcaggacatccattatgtgccaggcagtctggtactcaaacttggaaaaataaaaattaaaaagacatggaactgaccttaggggaatttgtattgctgttaaattcttttgagacataaggggaaaatcaagcctagtgtaaattaacattccttaatgctgtgccttttaaaaataaatgtggtatgagcaaaattattagtttatttcttcaacaataacttcttaaggtaggtagaaaagtgtttccaggcctattgatattactgattgttctttccttttcaaacagaatccctttttagaggtcaaggtaacagacacaccaaaaagatccagaagggattttggtcttgactgtgatgagcactcaacagaatcacgatgctgtcgttaccctctaactgtggattttgaagcttttggatgggattggattatcgctcctaaaagatataaggccaattactgctctggagagtgtgaatttgtatttttacaaaaatatcctcatactcatctggtacaccaagcaaaccccagaggttcagcaggcccttgctgtactcccacaaagatgtctccaattaatatgctatattttaatggcaaagaacaaataatatatgggaaaattccagcgatggtagtagaccgctgtgggtgctcatga

SEQ ID NO: 396 - DNA, 4828 bp, Rattus norvegicus
  source 1..4828: mol_type = genomic DNA
atgattcaaaaaccgcaaatgtatgtttatatttacctgtttgtgctgattgctgctggcccagtggatctaaatgaggacagtgagagagaggcgaatgtggaaaaagaggggctgtgtaatgcgtgtgcgtggagacaaaacacaaggtactccagaatagaagccataaaaattcaaatcctcagtaaactccgcctggaaacagcgcctaacatcagcaaagatgctataagacaacttctgcccagagcgcctccactccgggaactgatcgatcagtacgacgtccagagggatgacagcagtgacggctctttggaagatgacgattatcacgctaccacggaaacaatcattaccatgcctaccgagtgtaagtagctgttagagtatatcaacagttctgctgactgctgtcctagtgtttatgagaaacagatctattttcaggcttttaacaagctgttggcttatatgtaagtaggagagaaaggagatttttttttcaagatttcctgagaaacaaaaccgacaatgaaatctgtcttgtttccttgtagagccaagtagctcaaagttaacatttaatagtatttaattttatacgaaaaaatgtagaatgcttgtgtgtttagagcttaacagtataaggcaaggactgtgaggttctataagcaatgttaaaacatatgaaatttacaattgcatttgtctaaaacgtgctctagttttctcccccactaacactgaagaaagaaatctgctggatgtttatttgacactgttccacagttagagtgctttctgttatttaaaactgtcagtcacaaagattttatgctctttacgaattagaatagtaattgtgagagctattgcactgggaagttaaagaaggtcaatattaaatgcattagcataagccatgatgaagcaggcatagcaaaaataatactcaggcccgagtatcagaaaatgctcaggaaagaagcattataattgggaggtcatggtgtgaatgctgcttgtatgttcctggcactgcactgagagaaccctggctgtgtacttctaggcaggaacagggattgagaaccttctaaaagatttaattctttatgagggggaggggacgtcacctctaactgcagcatcgcttttgggagatgatatgtttcaggcagttcctatctgagttctctgaaaagcaagacaggtagccttagagagcaggcaggacactgaaagatttctgtgacatgtgtccgagatcttgctttaataccatgctttaaacacttaaaaccagacacgacatggattcaaatcagccctttactaagtaatcaggttacgacacagcaagtaattttcacttatgatcactctcggatcaaacagttcgggagaaagtcttccttatttacatggggtttggaaaaccccgaagaaaagcaattgttagtgctgaagttgcagtttctgacttttgagatagcttgaacatgatacctgattcttttttttcttttctttcttctttttttttttttttttttttttttttgctaattagaggcttcatgttgttcctttgaatgactcttccagagcccaagtgtcacagatgtattacattgtttgccatttctgaggttggttagattgctcccagtgtccctccccaggtaattgaggcctgggggaagggttcctttctccagactgactggtacagctgctcagtgagtgtaactgctcagattcccgaagaattctaagtggacgttccggcacagtgtctcttagtctctaatcatcatcacttgcaaatttcatgtgcacttccttctcttgaaaaaatatcccttagcccacagctctctggaaggggagtagaatcttcataagcaggtttgaaaatacagatgtctaaaaaaattctgaaaagctagagcaactattttttttcctggtaatttcatccgaaacaggaatgaagttcctcaccatgttttattttaaaagaccacgttacatacacactaccccagcagccgatgttaatgggtgattttcttcgtgtttcgatggggcctaacgtcaatcaatctcttcttattcctttgcagctgactttctaatgcaagcggatggaaagcccaaatgttgcttttttaaatttagctctaaaatacagtacaacaaagtggtaaaggcccagctgtggatatatctgagagccgtcaagactcctacaacagtgtttgtgcaaatcctgagactcatcaaacccatgaaagacggtacaaggtataccggaatccgatctctgaaacttgacatgagcccaggcactggtatttggcagagtattgatgtgaagacagtgttgcaaaattggctcaaacagcctgaatccaacttaggcattgaaatcaaagctttggatgagaatgggcatgatcttgctgtaaccttcccaggaccaggagaagatgggctggtaagtagtaactgaaagtaacattcgaacaaccatgttacatttttatccttgatataaatgataatagtgaaaaataaatcctattttcaatgctcataaggcagacaaagtaccttacccaaaggttggtctgtacccaaaccagtaggtgccaatctctgtgaacacattgttatcccatgatgctcttacttagcatgaagaccaaaagccaattacatcatgttcttaatttcataaggaggtccttactgggaattagatgtagtgtccttttcattgtcagacacataattatgcataaactatgcagcctatatgtaactgcagattctggtttctacccgacaaattaaaacctttccctcccattttatttgtttctttcctaggttattcattgaaaaatattggcttccaataaagtaaaaaatattaaaattctaattaaaatacctttatatgtgtagataggcttgattaaatatattctactcaacacttctaataaacatgctcagtacttacagaatgttggagccatgatatgtatagagattacttggtggattgttgctgataaaactgtaatttctaagctaacctttgcctcctagcccatctctgggctcctttagcattacttgcccaggaatttacttaggcattgccaaataattaaatagtgagtcagggatatgacaagacctcatagattataaaaattaataaaaaacatttaatcctccataagcctgagttactgttttgtgtcacttttatttacttctgctttgaaaaacttactgtgaacatattgttattttcacccattgtcatagtttacaccaaagcattgtacttggaaatgacaaatgtggttacctttttaatcttttggttgaatttgggaatagatctgttgtgtgtgaaacctattgtttaaagcgctatgatttcctaaatggtctattttctttatacttgccatttaaacactacactctacaaatgatgttctctttgacaagatagcctcgtgataaaagataaaattgctatcaactatttgagaacgttctttctcatagatagtaattatttaatcaccaaggttgctaatgggttttaattatttacaaggtggttaatatgatattccttggagttttccctctaaaaggaaatggtcttaaatgcactgggagactgaagctgtcgcagtgcaagcaaattcttcctcttccttcttctccttctgctgtggtcctgaggattgaactaggaccttgcacaggaggggcaaaccctgttccaccaggctccatccacacccagttcaccacttcttaaaaacctcctctttactcctttaaggatcttctttcacacactgtacacacagccactgttgtcatgctaatttccctcctcccactgtaatccctataatgctcagaaggagctattttgctctgacttaattttcacatttcttccagaaaagccctagggaagagagaccagagagtgccatccctccaagagtcatcagtcacctgcagccgatgtgcaatcagcaatgaggaaaagagggtgttcagtcctctcaccgtcccgcccaccttccttccctttcagcttacatttatttcccaagcatctgttcagccattatgagctattacgtctgataacagtatgaaaaagaaacaaaactctaaaaggtgcaaagggaatgaccacagggaaatgcctgatgctgttagattcttgaaaggaaaaatgaagtctagtgtctataaaaatttcttaatagtgcaattcttattttaaaaaagcatagaaatgatggtttttttcctgaataatgatttttaaggtaggaaggatttggggctccattaacacaattgtgctttccttttcacacagaatccctttttagaagtcaaagtaacagacacacccaagaggtcccggagagactttgggcttgactgtgatgaacactccacggaatcgcggtgctgtcgctaccccctcacggtcgatttcgaagcctttggatgggactggattattgcacccaaaagatataaggctaattactgctctggagagtgtgaatttgtgttcttacaaaaatatccgcatactcatcttgtgcaccaagcaaaccccagaggctcggcaggcccttgctgcacgccaacaaaaatgtctcccattaatatgctatattttaatggcaaagaacaaataatatatgggaaaattccagccatggtagtagaccggtgtgggtgctcgtga

SEQ ID NO: 397 - DNA, 32306 bp, synthetic construct
  misc_feature 1..32306: note = Synthetic
  source 1..32306: mol_type = other DNA
agagcgtcgggatatcgggtggcggctcgggacggaggacgcgctagtgtgagtgcgggcttctagaactacaccgaccctcgtgtcctcccttcatcctgcggggctggctggagcggccgctccggtgctgtccagcagccatagggagccgcacggggagcgggaaagcggtcgcggccccaggcggggcggccgggatggagcggggccgcgagcctgtggggaaggggctgtggcggcgcctcgagcggctgcaggtacacggggtcggcggctgtgcgcagaggcgtccctgcgcctctcgtcccttcgcctctcgtcccttcccttctctctgccttcttgcccgcctcctcggtcacagagcgacgaatgacgagaccaggtgtacccccactgtcgctctcagccccggggacttcgggtcctcgcccttgaaggccgcaggccctagtgcgccggctccgggctgcgggtccgggagcgcgggcgcagccaaggtgcagctgcgcggcgtgcggcgccgggggaacacgtggctgctccaggaagtcgccccagggaacggctgggattcgtgggtgaccttgggctcctaaaccttcggttccccgggctccgggcgggccccgttctcactgcggaaagggacaaagctgtccccgattcggttactagcgtgttacaggcattaattagatacgggtttctgtaaacttacccttcggctctggtacaacctgatcttgccatgctctgcctgttcgccttgtgtgtggattctgttttctcaaggcagaatccgactgaacgccgcaggtgttcacattaagaatattgctagcagttctcactacaagacgggagccataggagtgacttatttgtgaaagatacttggagattagcggtgtggtcagagggctgtgctggattgatgggcgccggagaggccgattgtgtcacattctgctggacagttcttttaaggttgggagggtgggtaagaaaatacattctgattcggctcttttcggataacgctttccctctgcttactgcttgtagagacctcacttacccgggggactggattctgcagctttttccattttcttccccgttgataagaggattaaagtaggaaattgtatttggctaccccatgcttatatgctaagcttactgtgaaaattaaggttaggctgtctagagtacttgtggaccctgctggttccccccgccccccggccctgaattttgggttacaatatgcttctcaagaaaactcagagttaagataatttttgtcatcgattttgcaaggttatatatagcatagcatccttcaatttcctttggatgttcttatcaagtaatggtggctgtaaacctagcctgtgttgaagattgttagatagacagcagtttggctaactccgccctaaggcgaggcagttacttgcctctgataatgtatttaaatgtcatggagcaagattcccagctaaacctgaatcgatcacaatgctagttaaaaatgaccctcggctgggcgcattggctcccgcctgtaatcccagcactttgggaggccaaggcaggcggatcacctaaggtcaggagttcgagtccagtctgactaacatggtgaaatcctgtctctactaaaaacacaaaaattagccgggcatggtggctcacgtctgtaattccagcactttgggaggccgaggcaggtggatcacttgtggtgaggagttcgagactagcctggccaacatggtgaaaccccgtctctacgaaaaatacaaaaattagctgggcatggtggtgcacacctgtaatcccagccactcaggaggctgaggctcgagagtcgctttaacctgggaggcagaggttgtagtgagctgagatcgtgctactgcactccagcctgcgcgacagcgagatgccatctcaaaaacaacaacaaaaaaactccctactaaaccagaagagtgatggggacgggaaaagattcctggtccaatgttttcattatatttttcatatcatttggaatctcatgcatcaggcatgccccagtactgttaaagacaatatttttactcattatcaggtagttcaataccagttattacaggatagggaagtcagtcagagaaggcttcatagagatgaagccttgagctgagcctggaagaaatgaggaggacctcaaggaacagagaagaatgttggtgggtaaaaacaggggctggattctgtctgattttggagaaaatagagggtagtgaagttgttaggcagtgaatgtgttccatttcatggttcaaaacgtggggctacgttttgcctacctgagcttcattattaatgtgagaaattgaattgttgttttcagtcaccattgagaacaccaaagataacacaagtagcttagattattatttatttatttatttttgacagagtttcacgcttgttgcccaggctgtagtgcaatggtgtgatctcggctccctgcaacctccacctcccccaggttcaagtgattctcctgcctcagcctccccagtagctgggattacaggcatgcgccaccatgcccggctaattttgtatttttttggtagagatgggatttctccatgtttggtcaggctagtctcaaactctcaacctcaggtgatctgctcgcctcggcctcccaaagtgttgctgggattacaggcgtgagccaccatgcccggccatcgctttgtgttcttaaaattaatttaaaacaagaaaacttgaggaatgatggttcagatgagtgttaaaacttgcaagatgttttttcctagaaaaggatgattaaaattggttcagggtggggccttccagttctggctctaatgattgggtccttactgttctggtggagtggtagtgataagctttttgtaacagaaggggcaaaagattgtgcttctggctgggcgcagtggctcacgccttcgatttccttgggatgttcttatcaagtaactaatcttagcactttgggaggccaggtgggtggatcaccctaggtcagaagttccagaccagcctggccaacgtggtaaaatcccgtctctactaaaaatacaaaaattagctgggcatggtggtgggcacctgtaatcccagctactcggagtctgaggtgggaaaatggcttgaacccgggagggggaggttgcagtgagccgagatcctgccattgcactccagcctaggcaacaagaccgaaactctgtctcaagaaaaaaaaaaagattatgcttctaagaatatggtctattgcatatggacactggtttttaaagcttgaatttaaaaagaattttttgtaataggttttagagctttttctttttcttttttattatttttttgagatggagtttcactccgtcacccaggctggagtgcagtggtgccatctcggctcactgcaacctccacctcccgggttcaagcgattctcctgcctcagcctccccagtagctgggattacaggtgcccaccaccacgcccatctaatttttgtatttttagtagagatggggtttcaccaccttggccaggctggtctcaaactcctgacctcgtgatccacctgcctcggcctcccaaagtgttgggattacaggcatgagccaccgtgcctggccagaaagctttttcttaatgccagttataataccctttgctttacaatttgcgtatacctcacagcttgctttgtgccgtgtgtgtttaatatgccctaagtgtactcgtatataggaaaagctttaaaatggtatccaataaatgtccattttgcaaatctcaggataatgtcattttcaagtatctagatgccctcaaaccaaattaactggaaaattcagatttcagttaaggcctttaacttaacttaggactttgattacagagatgtattttgctttgacaaaagttaaggttaatgtcttaaatttccagagatgataacacaatttctataacccagtaacccatttaacttcgcttagattatcaattttcagccttgaacaggccacttagtttctctaataactggcctcttcatctgtaaaacagcgtaatctgtgtttcatgtttcttcttgtgtcaaagatcgaatcacttgtaggaactattcattcagtcaggatcagtatttcttccccttcccattggagatggtttgtggtatttgtagcataactggtcttgtctgccttagtcttaattttgtctttttgtatgtgtcactttcttttttttttgagacagagttttgctcttgttttccaggctggagtgcagtggcgcgatcttggctcactgcaagctccacctcctgggttcacgccattctcctgcctcaggctcccgagtggctgggattacaggcgcccaccaccacgtccggctaatttttgtatttttagtagagacagggtttctccatgttggccaggctggtcttgaactcctgacctcaggtgatccacccatctcagcctcccaaagtgctaggattacaggtgtgagccaccccgcccagcagtatgtgtcacttttgtctactcagaacatagtggttcgtacttataattgcagcactttgggaggccaaggtgggaggattgtttgaggccaggagttcaagaccagcctgggcaacatagggtgaccttgtctctacaaaaagaaaaaaaaagaattatgtatataacaaactttaaaaaggatcccacttaatttagttgtcatgtaaactatggttaaataccttttctagaaaagtgataatgtattttaaaaatttaatgtatcatttagcctggtaatagaaagctcactaatctgatacagtagtatctttctcaataattctctattctgatacctaggttcttctgtgtggcagttcagaatgatggatcaagctagatcagcattctctaacttggtaagatattttcagttgtatttctgtgtctgcaagaatgtgaaatatacaagcatgactttaactgagtaagcatgaaataataaccccaatctattatcaggtattcatttacatttgaattggtagtcttgaggcataactgatctcacaaagagttcagccttcagtagggttaattatggaaagtcttggaagaattctcagagtggttctgggtgtggtagacggggacagcttagtagataagacgaattaaagccctgatcaaaatgttttagtaggagaagtaaaaagcaaaggcttgcggggcgctgtggctcacgcctgtaatcccagcactttgggaggctgaggtgggtggatcacctgtggtcaggagttcaagaccagcctgaccaacatggtgaaactcggtctctactaaaaatacaaaaaaaaaaaaaattagctgagtgtcatggcgcatgcctgtagtcccagctacttgggaggctgaggcaggagaattgcttgaacccgggaggcggaggttgcaatgagctgagatcacgccattgcactccagcctgggcaacagagtgagactccgtctcaaaaaaaaaaaaaaaagcaaaggctgaatgaggccaagtgtggtggctcactcccgcaatcccagcagtttgggaggtgaggcaggaggatcacttgaggagtttgagacttgcctgggcaacatagcaagcccatctctattaaaaaaaaaatgaaattttaagaaacattgagtagacagtatgagtgaaagctgaaagaacatacaaaaaaaacagccatccaggccatgacgagaaggagcctaactcttaacactctgtctagacctcaattctctcttatttgtatttatttatttatttatttttattttattttttgagatggagtctcagcctgggctctgttgcccaggttggaatgcagtgtgcaatcttagctcactgtaacctccgcctcctgagttcaagcgattctcctgcctcagcctcctgggtggctgagattacaggcgtgcgacaccatgcccagctagtggtttttttttttttgaatttttagtgagaggggatttcaccatgttggtcaggcttgtctcaaacttctgaccataaatgatctgtgtgcctcggccccccccagagtgctgggattacaggcatgagccactgtgtctggtctattctctcttttctgtcttctatcttatgcttagtcagaatttctgcttatttataactttgttttattcttgctcccttgctcccaccaacatcatggtctgggttactgcatagtatcctgaactgatttgtgcccctagtcccagctactcaggaggctgaggtgggggaatcagtagagcccaggattttgaggctgcagtgagctgtgatcacaccactgtactccatcctgggagagagagggagaccttgtctcaaaaaaaaaaaaaaatttacaaaaagggagagactgactgagaagaccagtgtgaactagcccttgactgggcccagggaagaatgttggtttgaaaggagaacaccctaaggaatatatagcaagttatagtaatggcccaataacaagcatatacctaaacgagcttttcctaaacattcccgtgcctgttcttcatcatgcctttttccgcaacacagtttggtggagaaccattgtcatatacccggttcagcctggctcggcaagtagatggcgataacagtcatgtggagatgaaacttgctgtagatgaagaagaaaatgctgacaataacacaaaggccaatgtcacaaaaccaaaaaggtgtagtggaagtatctgctatgggactattgctgtgatcgtctttttcttgattggtgagaatgaccattccaaacttcaatgttttctataaccaactctgggaagtctgttatgtcagctcagcatatagttattttgtaccttattttttttttttttttttttggagacagaggcttactctcttgcctaggctagagtgcagtggcaccatgttggctcactgcaacctcagcctcccaggtttaagcgattctctgccttagcctcctgagtagctgggactataggcgcccacgaccacacctggctaatttttttttttttttttttgagttggagtctcactctgtggctcaggctggagtgcagtggcgtgatttcggctcactgcaatctccgcctcccaggttcaagcgattcttctgcctcagcctcctgaggagctgggactacaggcgtgcaccaccacacctggctaatttttgtatttttagtagagacggggtttcaccatgttggtcaggctggtctctaactcctgacctcgtgatctgcccgcctcagcctcccagagtgctgggattacaggcatgagccactttcccgtccactttatgcctttttaagtgccactaggaagacaatcatgagtagattctatacctgtcattgaatttaatctggttggaaagagagacccatgaattatttcaatacgacgtgcaagtgttttctttttatttatgtatttttttgtttgctcccactccaccaggaagcaaatgctacgctagaaaatatccgcaggacactggcggtgcagcagctcagtctcatgtttcaagggggtcttttggaaaaaactacctatgttttgaataggtagctatttgaaataaagctagtatataatttattaagtggtttaaagtatacaaaactgagatgcattatatactttaaaactacttagaatttgatgaaaaccagtattttcaaggcttacctgaaaatattaacagattaacagggatagattacaaatgaaattctgagttcagctctggaactttgtctctttaggatttatgattggctacttgggctattgtaaaggggtagaaccaaaaactgagtgtgagagactggcaggaaccgagtctccagtgagggaggagccaggagaggacttccctgcagcacgtcgcttatattgggatgacctgaagagaaagttgtcggagaaactggacagcacagacttcaccggcaccatcaagtgagtgccagctgctgtgcaagtatctagacaagtaattcaagaattatgataggccacggggaaacaataatggtgacactgtggggaatggcttgttagagaagacaagacttgtcatgtttagctaaagaggggaaggggcctgtaaaaaactgaaactatactggtaggggaaaaggtagaacttctctggggagtctcctttttcttaaaaaattaataggcccttgatgttttccccatctttgtagcttattgcttgctgtcattctctggctctgatttttcttcttaacctcttgtaacgttgtactaagctctgctttgctgacaaggacatcagtagcttttctctgttttaggaagcaacacatgccagaagtagcctttttcatctccttgatcatgggtaactgcctgccttaagtctctagtgcttcttaatttctgtgatactcacccattaacccctaggccagtcagtatccagagacaatgtctccctctggtggaggctggaatacggtggcgtgctctcatctcaccgcagcttcatccccctaccatagcctcctgagtagctgggactataagcacgcagcaccacacccagctaatttttttttttttttttttaagagatggagtctcaccatgtctcccaggccggtctgttcttagatttttatttatttacttatttattttgagatggagtcttacgtgttgcccaggctggagtgcagtggcacgatttcagctcagtgcaacctctgtctcccaggtttaagcaattctcctacctcagtctcctgagtagctgagatcacaggcttgtaccaccatgctctgctaatttttgtgggttttttttttttttttttttttttgcagaaacgggatttcaccatgttggccaggctggtgtctaactcctgacctcagatgatcctcctgtcttggctcccaaagtgctggaattacaggatgaggcactgcacctggccaaatttctattttatatttatttatttattttatttgtaatgggctttctggcaaaaactagaaagcatgctagacaaattctaaaagagctgtaacacttgtccatagagttttactatctttgcacatacatgcctctgtgcaaagaataaatttatcttttcctttttgcaagcttcctacacttacagtggtactataattctttagtcttaagttatggcattttctacttcatctagttgatgcttttgtgtttatttactgtacaccagaccttatggttaaagtgagagtatagtccaccccacaaaaatgtaagaactaatatgctgagtaaatagaaagaagtatgggagatcggaccaaggagcagttctgcttcagggtattcagatgcttcacaagtaggtgagaattgaaactatgcactctgttcagcacagtattactatcttagattttatagtagatctggaagctactcatttcccctaaaactatcctaagcagatacattgtgttatgatgaggctcttgaaggagtgctttgtagtgggtaaagaagctttgaagttacaagatttggggcaaaattttttttcttttgtgatattctggtcagtctagaagttttgggtcacagttcatttatctgaactatgagggataatattttgctttcaaaacaatttgtttaatccttgacttaaatgtttattttaaagtaaacttaagttcatttaaaaggcattttctcctccaggctgctgaatgaaaattcatatgtccctcgtgaggctggatctcaaaaagatgaaaatcttgcgttgtatgttgaaaatcaatttcgtgaatttaaactcagcaaagtctggcgtgatcaacattttgttaagattcaggtcaaagacaggtatgttgaaagatggtaaacttatttttatacaagtagctattttcaggtgtgctaaatatagcaaagactttttgttagtgttgttggcttttttttgaaatggagtctcgctctgttgcccaggctggagtgcagtggcacaatctctgctcactgcagcctttgccttctgggttcaagtgattctcctgccttagcctccagagcagctgggattacaggcgcacgccaccacgcccagctaatttttgtatttttagtagaggtgggatggtctcgaacttttgacctcaggtgatcagcccgcctgggcctcccaaagtgctgggattacaggcgtgagccaccgcatgcggcccaaaggcttttaaaataaaaatcaagcttaagatttagaggtaaatttcctcaagccaaataatgcaagacatactaaatgtaagctattgtgttttttggaaggatgaccttaggcttattttaacttaatctttttaacagcgctcaaaactcggtgatcatagttgataagaacggtagacttgtttacctggtggagaatcctgggggttatgtggcgtatagtaaggctgcaacagttactgtaagtaaagcaaaacagtgcatgagactcttccctattgaatcattcaaaactcatcttttctgttcttaggagttataaatttacctgtaaaatgtaaatgatcatgagatattttggttttcaaccctctaatgacacagtcaacatgcattgtcttctctctctaatcactttccccatgtcctgttttattttttctttatagtactgctagcagctgacattatctatgcctttgtttccattagaatgtgagccagatgaagaatcatgggttagttctatttactgccatgttgcagagctttggagaatgcctgacatacatagtagtatttgctaaacaaatgcatatcctccctgtggggacagatgtaaatatccatcttggctggggcctagtcttagcttgattcgttaatgcttgatctttttctatttttgttttgagacagggtgtcactctgttgccctagctggagtgcagtggcgtgagcttggctcactgcattctccaccaccacccaggctcaagtgagcctcttgagtagctgagatgtccagttaatttttattttttattttattattattattattattattattattattatttggtagagacagggttttgccatgttggccaggctggtcttcaattgaaactcctgggctcaggtgattcaccaccctcagcctcccaaagtgctgggattacaggaggaagctgcttcgcccagcccttgatctttttaaatttaggcaaatatagtcaaattaacacagaaatagagaacagatagatagaataattttcagcttaaaaatcacatttgtggctgggcgtggtggctcacgcctgtaatcccagcactttgggagtccaaggtgggtggatcacctaaggtcagagctaccagcctggccaacatggtgaactctattaaaaatacaaaaattagccaggcgtggtggtgggtgcctgtaatcccagctacttgggaggctggggcaggagaatcgcttgaagccaggaggtggaggttgcagtgagcggatattgcgccattgcactccagcctgagcaacaaaagcgaaattccatctcaaaaaaaaaaaaaaaatcacatttgtaagtcaggcgtatctctagtggatacctttcggggctggtgcagttctgtgttgattccttgcctttctggatacttgtgctttatccctttgcctggctgcctataagccaggagtttagagatgggtaggttgttctgttaaagaacattgaagatttttgttcaacttcaagctttctgtattgagggcttggttgttagtgtcagtttatggctgttcatctggactcttatgagcttaggaacatcatgacacatctaaagttggtgtatgcaagtcactttgttgtaatagatggtgttttaattttgggacagatttattatcagacctttcagttaaaacctatttctatgatgtcctcaaggctaagattgttccaggcctccagtcccatgaccagcctacataggcctctttaatctaaatgcccttcagatgaaaggcagcatgggataaaagcatgaaagacataggaggccaaaaatcttgattttattccaatagctctgacctaaaagttgtaaagttttttagaactcatgtcttttttaggccttggcctccttttatctcttacttgggttgcctgtcttaggtttgatctataacactcttctgtctcaagattttagagctgttccgataccataatgctcattaaatctaatgtctttgttctagggtaaactggtccatgctaattttggtactaaaaaagattttgaggatttatacactcctgtgaatggatctatagtgattgtcagagcagggaaaatcacctttgcagaaaaggtgagtatgagttattataatattaaatacagtacttttggtatcttactcttcaggtaagtgatatttcttgttaatattcttacattctgaaaatcagcaatcttaaactctcataccagataatataatttattaaaatgctcaacaaatgaagtaagttccacttacctaatcagaagtgcttaagtgaaagctatttctctgtataactcagttttacgcatatacagaattcagctaaaagcatgttttataaaaaggaaaattaatagccaaacatacacaaggaactagagtggaacatatcaaaagacagtggtgatttctgcatttttaaaaaaagtggcagggctcacacctgtaatcccaacactttaggaggctgaggtgggaggactgcttgagccctggaggttgtgagatgtgactcgtgccactccagcctgagtgacagtgagactcaaaaaagtggttgtcttagatgggtttttgttatttttcttttcttttttttttttttttttgagacggagtctcttgtcaccctggctggagtgcagtggcgtgatctcagctcactgcaacctccgcctcccaggttcaagtgatgctcctgcctcagccttctgagtagctgggattacaggtgcccaccaccaccatgcctggctaatttttgcatttttagtagagacagggtttcacgacgttggcctggctggtcttgaactcctgacgtcaggtgatccacctgccttggcctcccagattgctgggattacaggtgtgagccaccactcctggcctttgttattctttttttttttttttttttttttttgagagggagttttgctcttttgtccaggctggagtgcagtggcgcaattttggctcactgcaacctctgccttatggtttcaagcgattctcctgcctcagcttcccaaatagctgggaatacaggcgccagccactgcgcccagttaatttttgtatttttagtagagacagggtttcaccatgttggccaggctggtctcgaactcctgagcttgtgatccccctgcctcagccttgcaaggtgttgggattacaggcgtgagccaccactcctggcccgttactcttattttgcaaacaagtgagttaatttttcaggaagcaattaataaattaccagataaacaatttgaaatatttggaagtattataagtttagtcctctgtaaccatttggcctttagcataatgtccaggatgtattctcatttcgtatgatcagatcttcattttctgagctttatatgttttcttttaggttgcaaatgctgaaagcttaaatgcaattggtgtgttgatatacatggaccagactaaatttcccattgttaacgcagaactttcattctttggacatgtgagttatttcttgagtaaatcaccgttttgagttccttgagttgttcttggattcctgtattagcagaaatagcactgtgtcttccttaactgctcttttttctgggagggcgttagcagtaagcaagaagatagattacattgactttgaggctttattatttgttgctaaaagtactttgtcaatagtgccttgaatttgagaatttccatatgccatgaaaacaggagtcacattgtagagccactcagatttttgaggcttcaagttggtaaactaaggttgggctgcagccttataccaaacctgaatcttacagagaagttttgaggaagtatgtgatggagtgaattgctcttttgttttcctaggctcatctggggacaggtgacccttacacacctggattcccttccttcaatcacactcagtttccaccatctcggtcatcaggattgcctaatatacctgtccagacaatctccagagctgctgcagaaaagctgtttgggtaagtttttatttgaaagcggtcttgcatagtgaggttttatgattagggaagaacggtaatatgttgattaaaatgttaaacatgatgataattttccacatttgggaatttggaggatggttagctgttaccttggtacagatataaatgaatttttctctataaagagatcttaataatggactttggacttataaacacaggagaataaggagacttataaacccagtgaattccttgtgcaagattcctggcatagcttctgctcaagtacttctgtgctgaagcacgatgcctatagcagcccattcagttagtagagagaatctgttagaattcatattgggataaaatcctattccccgaaacatccatttgtctggatttttcttctaagcaatacggtatgattccagttaccttgtctatagattgagaagccttgcttcttatgatggtttccagagaaaccatttatggttgtggctcgctcctctggatatcctccctgtaacgttagtgtctctctttaaaaacagagcccagttccattagagtacgtagcattaattttgatttggatgtggacatatttatcatttcctgttattacaggatggagatctagtttcaggcctttatgaaagcatttatctcctgtatgacataggttctctgatcctgtttctttaacataattggatagtgaaaatatattctacttgatagtctcaaatgaagaacatctgtatataaggagtatatgaaataccatgactgttgatcatgctgagaggcctttagcataggggagtgtgtaacataccatgactattgataacgctaagaggcatttagcataggtgatttttttgactcattctacctaccacctacaaatcgtaaccaacctgtgaagccagcgtcccatcttatccttatgtagtaggggagtaataatgtttcaacctatatttatgtaagtaagcccccttaggagcagctattatttgggtaacacagaggaattagataggggaagcacaagattttttttttattttgacagtctcactctgttgcccaggcaggagtgcagtggcatgatcctggctcactgcaacctccacctcctgggttcaaggaattctgcctcggccttccaaagtgctgggattacaggcgtgagccaccgcacccagctgaggaatattttttataactgagctaagaatgtgtactatccttgttagtggtgacagttgggaaacataaaagtgtattaatattcttttatatattagaagaacttcattttgagtccatcttggtatgtattccaaatataaactacgtaagtatgtctggcagaaaggcgcatagttagagaagtgttttaaaatattgcttaattaatggtttccaattggctgcctgcagatcaaagtaagacgcaaatggttcaccactagagagtaagtttttttttgtttttattttgttttgttttgttttgtttttttttgagacaggacttgtgctctgttgcccaggctggagtgcagtggcgtgatctcggctcactgcagcctccgcctcccaggttcaagcgattctcctcctcatcctccttagtagctgggattacaggcgcatgccaccatgcccagttaatttttgtatttttagtagagtcggggtttcaccatgtcggtcaggctggtcttgaactcctgaccttgtgatccacctgcctcagcctcccaaagtgctgggattacaggggtgagccacttcgccgggctgagagtaagttttgtttatatgtcctcttaatctgtaacttcactggacaggagtaaaccctgggcaaggaacaataactcagaacttacgcctgctttctgattctaggaatatggaaggagactgtccctctgactggaaaacagactctacatgtaggatggtaacctcagaaagcaagaatgtgaagctcactgtgagcaatgtgctgaaagagataaaaattcttaacatctttggagttattaaaggctttgtagaaccaggtaaagaccgcccccccccccccccgccccgctttttttttgttttcttttctgttcctaaggatgtggctagagaaggagcgagtgtaggaatgctggcttggcttggttttatgaagtgctcaatcttgtctgtcctaaagttaattgtttatgtgttagtttcttttttttttttttgagaaagagtttcactcttgttgcccaggctggagtgcagtggtgtgatctcggctcactgcaatttccgcctcccaggttcaagccattctcctgcctcagcctccccagtagctgggattacaggcatgcgccaccacgcctggctaattttgtatttttagtagagacagggtttctccatgttggtcaggctccatgaggtcagagctcctgacctcaggtgatctgcctccctcagcctcccaaagtgctgggattacaggcatgagccaccgcgcccagcctatgtgtcagttttattgggaggtaataaggccctaggaaattcttgttaaaaattgaccattatgactagaaaatctattctaagttattgactagaccagtgataagcaaatttcttaagggggcagataataaaccttttgccaggctatacagtctctcttttagctgttcaactctgtgggagcaagaaaacaggcacagactgtgcgtagtgaatgggcatgcgggctgtagtttgccagtccctggagttaactttaaatgcaatcaaacagccaacacttactaagaaataagtccttggacttaagtagtcagtaaatttaattagtagtgtaggaaaaaagtagctctactagtaaggtaaaattaatattctcatgtgaatttttaattcccagagtttttagtcagatttgaagtaaggctcttttatccttaatacatatactgtgcttttacctttctactgatgtgctaattctagaaaagtttagaagctgattatataagttctttcttcctcttttttcttttttaaagatcactatgttgtagttggggcccagagagatgcatggggccctggagctgcaaaatccggtgtaggcacagctctcctattgaaacttgcccagatgttctcagatatggtcttaaaaggtagagtacaaattttgattcttttgaatattggtgcactgcatacagttctagatgttatactgtgctttgctcactttgcctgcattcctgtggttctcatgctagactctagttcttaaatacaaggcagattgtcttttgttgtagctgccttttcctttgaaacagctttccataaagtgtcttaactgtgctagaaatcaccagtttctttgagacagtggagttactgagccctagtgcttagtgtggtggatccagagtgataaggtggatcatagtccctaagcaatctatttgaaagcagtagcatacctctctactcatgtactgaggcctaacagctattgaaattttgttctgtttattcatttattcattttttgagacagagtttcactctgttgcccaggctggagtgcagtggtgtgatctcacttagctcactgcaacctctgcctcccgacttcaagcaattctcctgcctcagcctcctgagtagctgggattacaggcacccacaaccacacccggccaatttttgtatttttactagagacagggtttcgccatgttggccaggctagtctcctgacctcaagtgattcacccgcctcagcctcccaaaatgctgctagtgagccaccgtgccctgcctcttttgtttatttttgagcctttctgtcctactttccactctttcacactcctacccacccacacattcaaaatcacgtcacattcttgaatctttgggtcttagggcaaactgcaatgcttaactttaatacagagtacattaatggagaaaaagatacagtgagggaagtgggagggatggagggcagtgtgatacatgtaacctcaaaaggtgctgtcacaaatatagtttctctgcaaactcttcttgtaacttaaatttgtgaatttttattttattttagaattatttttttaaaaatccaatgtttggatttacctctgaagatttttctcaagatgtgcatcatcatgcttacactgttttcaatgatctctgggtccagaagttaaggaactccaagaatgaaattgtgaaagggtgactactggcccctgctatgtactcaaaatcttatttgcagatctcctatcttgctctttgtaggttactttaaaaaaaattattcctattcttttattcttttacctggggtctcaaaaaaagattttgttagttttttttttcttttttggctcagaaaaaaaagattttggaatctgctatcttggaattagaccttctgattcatcttaagtgggataccttccatccttgtctgtgtataacctttcctcaggtaaagctaacttttttctctttcagatgggtttcagcccagcagaagcattatctttgccagttggagtgctggagactttggatcggttggtgccactgaatggctagaggtattctttatcatcccttcccatattggacacgagcttgtgggcttaggctgttgtccagaagtgatgtttttataggtttgattttaccacttttgcctttgcgtttagtctcagtagagtccagaattgaaaatgaatccctaatgctactgtatgtgataaataaacagatttatacttattagtgttttcccttctcttctagggatacctttcgtccctgcatttaaaggctttcacttatattaatctggataaagcggttcttggtaagtatccctttcattagctgtgtatgaattcaggtaaacttttttgagatggagttttgctcttgtcgcccaggctggagtgcaatggcacgatctcggctcactgcaacctctgtctcccagattcaagcgattctcctgccttagcctcctgagtagctgggattacaggtgctcactaccacacccagctaattttttgtatttttagtagagacagggcttcactatgttggccaggatggtctcgaactcctgacctcaggcgatctgcctgcctcggcctgggattacagatgtgggccactgtgcctggccagataaactactttgaagtggaagaaagcttttttttttttttgagacagggtctcactgtattgcccaggctagagtgcagtggcacaatcttggctcactgcagccttgacctcctgggctcaggtgatcctcccacttcagccacctggctaattttttttgtagagatggggttttgccatgttgcccaggctggtgtcaaactcctgagttcaagcattctatgtcagctgcccaaaatgctgcggttacaggcatgagccattgccctcagcctgtatcttaaccttcctttaaatagtctgtcaagttacacagtgagcacaattgcttgtctagaacagtgggtagttctcagtgtggcccccagatgagtagcattaggaactgttacgaatgcaaactgtcatgtctaccccagacctttgagtcagaaatgggagtgttggtctaaaaactgggctttttgggctgggcgcagtggtgcacgcctgtaatcccagcacttgggaggccaaggcaggcggatcacctgaggtcaggagttcgagaccagcctggccaacatggtgaaaccccgtctctactaaaaataccaaaattagccgggtgtggtggcgagtacctgtaatcccagctactcaggaggctgaggtaggagaatcacttgaacccgggaggcagaggttgcagtgagccaagatggcgccattgccctccagcctgggcgacagagcgagactccatctcaaaaaaacaaacaaaaaaactgggctttttttttggcaacccttggggaataaaaacctattattttcttaaggacaaagtatcctgaagcaaaaaaacccaaacaaagaaacaaaaaactttaacaagcactacaggtaattctgatggactaaagttttaggaccataagtctggactatattgaggtgagaagaaactaaactatgccatatagaatggtacttagagagtaattcacatcctgttacgttgtggcatcactgatagaaatattggataatgaaacttctagaagagtttgaatgttcactggcagcagaaaattgacaaaagggtttgaatgttatttaaagtgcagctgtacattcaacaggaatggggtaaaaaagaaagtgcagatgtagctgatgagctgagaatagtgaaatgtctacatgggggaaaaaaggaaagagttacaattaaacctctctaggttagttatttccctgttgtatgtttgccgcagaatgtgctgagtatagcaagcatactatgtatagctctaacctgggtgaaccagaaagttaaacatgaaattgctaatgggggaggctgcacatgtgtgggggcagtggatttatgggacctctaggtacctttctcttaattttgctgctgaacctaaaactggtctgatttttttttttttttttttttttttttttgagatggagtctcgctttgtcacccaggctggagtgcagtggcgccatcccagctcactgcaagctccgcctcccgggttcatgccattctcctgcctcagcctcccgagtagctgggactacaggtgcccgccaccacacccggctaattttttgtatttttagtagagacggggtttcactgtgccagccaagatggtctcgatctcctgaccttgtgatccacccgtctgggcctcccaaagtcctgggattacaggcgtgagccaccgtgcccggcctaactgctctgatatttttaaaaaaggtgacttggattaaagtatgcaaactcaaggagtagtacgagcccacttgagtgaagttagcttagttgctaaagagcttgataccaaaattacttttgtttacttgatgaatgggatagttgttgcacagggccactgatctagattactgtcttatttgtcaagtacttatagttgtagaagtagcagtgtgaaaattatcggaatggagaaggggcaatgataaaacaatttattttcaggtaccagcaacttcaaggtttctgccagcccactgttgtatacgcttattgagaaaacaatgcaaaatgtgagtatatacctcattacaaaaatgtatgacttaatttttgttgaatcaacctgagataaaaaacactgatatgtaaaccgtagtcagtaacaaaaaataggaattgagaataaattttatagcagcgttatttaagggatacttgcctattgaaccatatgagatgagggctccaatcttaaagaatatgttgtttatttaggaatatataacaaaatgccatgaggcctaagctgtagtgcaggggcccacaggggattgtctatagagtcacaatgctaaggaaggcttaaatcaacttgaactatactttgagaaggccggaggaaatattcattgaataaacaattaccatagttttgaatgagggagagcatgtgaaagaaaatatttgcctatgtggggtggggggaggggagagggatagcattgggagatatacctaacgctagatgacgagttagtgggtgcagtgcaccagcatggcacatgtatacatatgtaactaacctgcacaatgtgcacatgtaccctaaaatttaaagtataattaaaaaaaaaataaataaataaataaaaaagaaaatatttgcctaatgggattagaggctgtatattggagtgagtaaagttagaaacaggtcagatagcagacattggccttgatccaagagatactagggattataggatctcaagcaaggtgatcatgaatttgccagttaggttggtggcataagatgcactagaaggaagaaaccagaaacaagataggcatagtgtgaagcccagagagggcttttacaattgtgggtaagccaccatggttttgtttgtttgtttgtttgtttttgagatggagtcttcctctgtcttcctccagcactcaggctggagtgcaatggtgcgatcttggctcactgcagcctccacctcctgggttcaagcgattctcctgcctcagcctcctgaggagctgggactacaggtgcacaccaccacacctggctaatttttgtatttttagtagagacggggtttcaccatgttggccaggatggtctcaatcccttgacctcatgatctcttgaccttggcctcccaaaatgctgggattacaggtgtgagccaccgcgcccagcttttattcatttttttttccttttttttttttaagagataaagtcttgctgtgttgcccaggctagtctcaaacttctgggctcaagtgatcctcccagctcggcctcccaaagtgttgggattgcagttgtgaactaccccacccggcctaggcccacttttaaaatgttaattaagaagaaaacattttttcctcaccataactaaaggaactgacaacatgagcctagttagtaataacttaaagttgagattgttttaactatcataaataatttcttttcaagaagatataatacaagttttttatttaaaaattgttatagagtaacatgttagtgactagcctgaataaataagttccaaaaggttagttttaatgataatttcttatcttacaggtgaagcatccggttactgggcaatttctatatcaggacagcaactgggccagcaaagtgtaagttgagaaaagtgaatgaacaaactaatagaaaagcagagattctacctactacattaggtagaatctaaatctgtccttgcattgaacttacttacacctaaagatattcagctaaagaatttattttggatggggggactagcacgatagaacagtctattctttaaaacactttctaaagacacattctttgtctttgcagtgagaaactcactttagacaatgctgctttccctttccttgcatattctggaatcccagcagtttctttctgtttttgcgaggtaagtctgttcatttaaatgacaaatggagagaggctctctaaaaggaagtgatctgtatttgggaatagggcattgcaatgggaatgcctgtgctatagtcaactatgtacatattcagaggagtaaaggaaaacaagtttttaaggacaaatgacgaggattacaaaattactttgaggtaattattcttggctaccaagatcaataacaaggatgacaccagtccaaggttgacaggcagttgctaggcagattttctcacgagagaagttttttggtgcaaggttgcagtggcctttgtgtaaggttgtagtttttgtaaaaaggaaaaaaaaaaacccttaatccttgttatcagacatacaagggtgagacccttctcttcagggttgcatttttgttaacactagtgactccattttgattttgacaacttgcacatatcttagttgttgggttttttttgtttgttttttgttttgtttttttttttttttttgacaatggtgacttgctctgtcacccaggctggggtgcagtggcccgatcatggctcactgcagcctcaagcagtcctcccccttcagcctccaaactgtttggattataggcaagagctacttactacacctggccatggatcttcttgtgtcaactttgagaccaaatttactgcagtgcttaaaatgttttaagaagttatacacatgtgctggatgtggtagctcacgcctgtaatcctgtagcaggacaagccgcagacaaatcccctcagacaccgagttaaagaaggaagggctttatttggctgggagctttggcaagactcacgtctccaaaaactgagctccccgagtgagcaattcctgacctttttaagggcttacaactaagggagtctgcgtgagagggtcgtgatcaattgggcaagcagggggtacgtgactgggggttgcatgcaccggtaattagaacagaacagaacaggacgggattttcacagtgcttttctatacaatgtctggaatctatagataacataactggttaggtcagggctcgatctttaaccaggaccagggtgcggcagcgctgggctgtccacctctgccttttagtttttacttcttctttctttggaggcagaaattgggcataagacaatatgaggggtggtctcctcccttaatcccagcactttgggaggccaaggaaggcggattacgaagtcaggagtttgagactagcctgaccaaaatggtgaaaccccgtctctgctaaaaatacaaaaattagtcggacatagtggcgtgtgcctgtaaccccagctactcaggaggctgaggcaggagaatcgcttgaacctgggaggcagaggttgcagtgagctgagatggagccactgcactgcagcttgggtgacagagcaagaccctgtctcaaaaaaaaaagttatacacatgtaattattgcatgttccttcattattagttttaacatagacttgttaatctcaattagcttaattagcatttgagtttattgctaaaacttctttatgagttttaataatgaggcttggccgagtgtggtgggtcatacctgtaatcccagcatttgggaggccaaggcgggtagatcacttgaggtcaggagttcaagaccagcctggccaacatggttaaaccccatctctactaaaaatacaaaaaaattagctgggcatggtggcacatgcctataatcccagctgctcaggaggctgaggtggaagaatcgcttgaacccagggggcagaggttgcagtgagccgagatcgtgccattgcactctagcctgggcaacagagcaagatcgtctaacaacaacaaaaaaaaaaccaaggctgaatttcttgagtgattgagcagtggctatctattggacagtccagctgaacagtattttcctcaggctgggtgcagtaactcacacctataattccggcacattgggtggctgaggtgggcagatcacttgaggccaggagtgagaccagcctgggtaacgtgcctagactatatctctacaaaaaattttttaaattaagtggcccagtggccagctgtagtcccaactccttgggaggctgaggcaggggggtcacttgagctaggagcttaaggctgtggggagccatgattgcatcaccacgctccagcctgggtgacagagtgacctcgtctcaaggctgcagggagccatgattgcatcactgcactccagcctgggtgacagagagaggcctcgtctcaaggctgcggggagctgtgattgcatcactgcactctagcctgggtgacagagtgacctcgtctcaaggctagagggagccatgattgcatcactgcactccagcctgggtgacagagagagacctcgtctcaaggctgcagggagtcatgattgcatcgctgcactctagcctgggtgacagagaccttgtctcaaggctgcggggagtcatgattgcattgctgcactctagcctgggtgacagagagaccttgtctcaaggctgtggggagtcgtgattgcatcactgcactctagcctgggtgacagagagacctcgtctcaaggtatgtttcatgtatcttctcttttttcattgataaaggcccaaacttcccagagagaaaaacatacagccttaaggaatttggctagaagtctattcagggcatatgatacgatagaacagggattctgtagaacctggaagaaagtagtcactctaggagtaggttagcttgagagaagtagcaagaatgtacttaaagcagcagataatgagatagaattggggtaaattgcggtaggaatatgttagaagcaagggtggaactgtcgtcactgttacctcgatggcgaagccagaatgtgaggctcttgctcttagaactcacgtgagtaccatagcctcgcgttgtcttgcaggacacagattatccttatttgggtaccaccatggacacctataaggaactgattgagaggattcctgagttgaacaaagtggcacgagcagctgcagaggtcgctggtcagttcgtgattaaactaacccatgatgttgaattgaacctggactatgagaggtacaacagccaactgctttcatttgtgagggatctgaaccaatacagagcagacataaaggtgagcactgattccaattacgtttttattttgctgaatgtcaagtattttgaaatgtgatgtgttcctgtgtgttcctgttggaagggtgattgtagccatagtacattttaaagtgaactgaggtataattgtatgtagaattggtaacttgtttgagagaagtcgggaggctgtggattagagacctaggacagagctcagcaggtgtttcagaatccagagcagtgtcaggttttctgtcactcatgtctcccaggcagcccgtcagtaggacacggaatatgaagatctcagcaaggagttgggctgtgtgcctctcgggcgtgacccggatggaaagacagcacagctagcaggattccatctcgtagtgatctgcgcatctaaaagtcaaatattctattaaacgaaactgataagcagggtgaggtggtgcatacccgtagccccagctacttctgctgaggcaggaggattgctggagtccagcccaggcaacatagcaaaatcccatctctaaataaattaataaaactaatattaaagtagcttccagattgttttatggtactaggagttgatttttaacagatctcttaattgaagtaaatcactgacaaccgaatctttttatatcttttttatttttatttttattttattttttttgagagatgaagtctcgctcttgtcccccaggctggaatgcaatgacatgatctcggctcactgcaacctccacctcccggctttaagcgattctcctgcctcggctccccaggtagctgggattacaggcgtgtgccaccatgcccagatagtttttgtgtttttagtagaagccggggttttaccatgttggccaggctgaagtgcagtggcgagatctcggctcactgtaagatgcgcctcccgggttcacgccattctcctgcctaagcctcccgagtagctgggactacaggtgccggccaccacgcccggctaattttttgtatttttagtagagccggggttttaccatgttggccaggctggtcttgaactcctgacctcaggtgatccacccacctcggcctcccaaagtgctgggatcacaggcatgagccaccacgcccggcatcttatgtctttcttgaaactaattgtaactgttgaaaatggaacttaccaggtggaaataactaaatcctgaagtaccttgaaccaaaatgttttcccctatagggacattttcccccaaaaggagaattgaactggaaacaatatagtacataggattatataattatgttcaatttcttaatgagaatggttttcttacatgctgggctcaaatatgagtgtatatcacagtccatagagcttggaacccctgtgcaaggtgctttcggagtcttgagcttatctgcgagttccttttatcagaatcttacttaacgcacgttaaattagaaaggcatacaaaagaatgtccttagaaataaaacttctcatagcgaataatgtctgtttcaggaaatgggcctgagtttacagtggctgtattctgctcgtggagacttcttccgtgctacttccagactaacaacagatttcgggaatgctgagaaaacagacagatttgtcatgaagaaactcaatgatcgtgtcatgagagtaagtgaacttttgggaaaggaggaactaaagtatgtgtaaaataaccgataaatcttacacttctgcaaagtggacaaactctaggagtctagaattcctttaagaagggagcattaatggtttagctgtcattttctgtttctgctgtctaattcagaacttagtcaaacctagtctttttggaagagacttgctgtaaaacttccatgtatgctccaatggggaaaagaatctgaacacatttaaagttttcctttgtaaaatgaatcagtttcctttaaaaaaattttttttttttttgagacagagtttcactgttgttgcccaagctggagtgcaatggcacggtctcggctcactgcaccctccacctcccaggttcaagtgattctcctgccttagcctcccgagttgctgtgattacaggtgcccaacaccacgcccggctcattttttgtatttttagtagaaacggagtttcaccatgttagccaggccggtctcgaactcccaacctcaagtgatccacctgccttggcctcccaaagtgctggtattacaagcgtgagccgctgtgcctagcctcctttagaattttaaccttagaagattagcattagcctggttctcagcattcttttttccttactctgctatagaaagtctgatcagctggctgggtacagtggctcatgcctgtaattccagtactttgggaggccgaggcaagcggatcacctgaggtcaggagttcaagaccagcctgaccaacatggagaaaccccatctctactaaaaatacaaaaattagctgggcgtggtggtgcatgcctgtaattccagctgctcaggaggctgaggcaggagaattacttgaacccgggaggtggaggttgcagtgagctgagatcgcgccattgtactccagcctgggcaacaagagcgaaactctgtctcaacaacaacaaaaagccgggcacggtggctcacacctgtaatcccagcatgaattgcttgaactcgggaggtggagggtaccagtgagccgagatagcgctgttgcactccagtctgggcaacaagagcgaaactctgtgtcaaaaaaaaaaaaaaaaaaaaaaagtctgatcggcattcttaaatttgggacattttacatttgaagtgaactgttgttttactacaaaagtcacagggctgtgtaaattgccttgtgtgttgttttcgtaggtggagtatcacttcctctctccctacgtatctccaaaagagtctcctttccgacatgtcttctggggctccggctctcacacgctgccagctttactggagaacttgaaactgcgtaaacaaaataacggtgcttttaatgaaacgctgttcagaaaccagttggctctagctacttggactattcagggagctgcaaatgccctctctggtgacgtttgggacattgacaatgagttttaaatgtgatacccatagcttccatgagaacagcagggtagtctggtttctagacttgtgctgatcgtgctaaattttcagtagggctacaaaacctgatgttaaaattccatcccatcatcttggtactactagatgtctttaggcagcagcttttaatacagggtagataacctgtacttcaagttaaagtgaataaccacttaaaaaatgtccatgatggaatattcccctatctctagaattttaagtgctttgtaatgggaactgcctctttcctgttgttgttaatgaaaatgtcagaaaccagttatgtgaatgatctctctgaatcctaagggctggtctctgctgaaggttgtaagtggtcgcttactttgagtgatcctccaacttcatttgatgctaaataggagataccaggttgaaagaccttctccaaatgagatctaagcctttccataaggaatgtagctggtttcctcattcctgaaagaaacagttaactttcagaagagatgggcttgttttcttgccaatgaggtctgaaatggaggtccttctgctggataaaatgaggttcaactgttgattgcaggaataaggccttaatatgttaacctcagtgtcatttatgaaaagaggggaccagaagccaaagacttagtatattttcttttcctctgtcccttcccccataagcctccatttagttctttgttatttttgtttcttccaaagcacattgaaagagaaccagtttcaggtgtttagttgcagactcagtttgtcagactttaaagaataatatgctgccaaattttggccaaagtgttaatcttaggggagagctttctgtccttttggcactgagatatttattgtttatttatcagtgacagagttcactataaatggtgtttttttaatagaatataattatcggaagcagtgccttccataattatgacagttatactgtcggttttttttaaataaaagcagcatctgctaataaaacccaacagatactggaagttttgcatttatggtcaacacttaagggttttagaaaacagccgtcagccaaatgtaattgaataaagttgaagctaagatttagagatgaattaaatttaattaggggttgctaagaagcgagcactgaccagataagaatgctggttttcctaaatgcagtgaattgtgaccaagttataaatcaatgtcacttaaaggctgtggtagtactcctgcaaaattttatagctcagtttatccaaggtgtaactctaattcccattttgcaaaatttccagtacctttgtcacaatcctaacacattatcgggagcagtgtcttccataatgtataaagaacaaggtagtttttacctaccacagtgtctgtatcggagacagtgatctccatatgttacactaagggtgtaagtaattatcgggaacagtgtttcccataattttcttcatgcaatgacatcttcaaagcttgaagatcgttagtatctaacatgtatcccaactcctataattccctatcttttagttttagttgcagaaacattttgtggtcattaagcattgggtgggtaaattcaaccactgtaaaatgaaattactacaaaatttgaaatttagcttgggtttttgttacctttatggtttctccaggtcctctacttaatgagatagtagcatacatttataatgtttgctattgacaagtcattttaactttatcacattatttgcatgttacctcctataaacttagtgcggacaagttttaatccagaattgaccttttgacttaaagcagagggactttgtatagaaggtttgggggctgtggggaaggagagtcccctgaaggtctgacacgtctgcctacccattcgtggtgatcaattaaatgtaggtatgaataagttcgaagctccgtgagtgaaccatcattataaacgtgatgatcagctgtttgtcatagggcagttggaaacggcctcctagggaaaagttcatagggtctcttcaggttcttagtgtcacttacctagatttacagcctcacttgaatgtgtcactactcacagtctctttaatcttcagttttatctttaatctcctcttttatcttgga

SEQ ID NO: 398 - DNA, 32306 bp, synthetic construct
  misc_feature 1..32306: note = Synthetic
  source 1..32306: mol_type = other DNA
acgcaaggccccggggggccgggggcggggccaggctataaaccgccggttcggggccgccatcccctcagagcgtcgtgatatcgggtggcggctgaggcggcgcgggacggaggacgcgctagtgtgagtgactgcgggcttctagaacgacgccgaccctcgtggcctcccttcgtcctgcggggcttgctggagcggccgctccgctgctgtccagcagccacagggggccgcgcggggagcgggaaggcggccgcggccccaggcggggcggccgggatggagcggggccgcgagcctgtggggaaggggctgtggcggcacctcgagcggggtcgggcggctgtgcggagaggcgtcccttctcctctcgtcccttctcctctcgtcccttctcctctcgtcccttcgcctctcgtcccttctcctctcgtcccttcgcctctcgtcccttcttgcccgccgcctcagtcacagagcgacgaatggcttctcttactgctcggaggacgagagcaggtgtaccccacgtcgctcagccccgcggacttcgggtcttcgcccttgcaggctgcaggccctcgtgcgcgggctccgggctgcgggtccgggagcgcgggcgcagtcccggtgcagctgcgcggcgtgcggcgtcggggaacacgtggctgctccaggaagtcgccccggggaatggctgggatccgtgggtgaccttgggcttgtaaaccttcgcttccccgggctccgggccggccccgctctcactgcggaaggggacagagctgtccccgattcggttacctggcctgttacaggcattaattagatacgggcttctgtaaactgacccttcggctctggtaccagctggtctcgccacgctctgcctgttcgccgtgtgtggattctattttctcaaggcagaatccggcggaacgccgcaggtgttgacattaagaatattgctagcagttctcacgacaagacgggagccatgggagtcttattggtgaaagacacttggagattagcggtgtggtcagagggctgcgctgtgttgatgggcgcccgagaggccgttgtgtcacattctgctggacagttctttaaggttgggagggtgggtaagaaaatacattctgattcggcttttttcggttaacgctttccctctgctcactgcttgtagagacttgggtacgtcacttatccggggactggattctgcagctttttccattttcttccccgttgataagaggattgaagtaggaaattgtatttggccaccccatacttgtatgctaagcttactgtgaaaattaaggttaagctctctagagtgtttgtggaccctgctggtccccccaccccccgccctcaattttgggttacagtatgcttctcaagaaaatccagagttaagataatttttgtcatcgatattgcaaggttatatagagcacggcatccttcaatttcctttggatgttcttatcaagtaatggtggctgtaaacctagcctgtgttgaaggtcgttggatacacagcagtttggctaactgtgccctcaggcgaggcagttacttgcctctgataatgtatttacatgtcatggagcaaggttcccagccaaacctgaattggatcacaatccaatttatgttaaaactgattcttggttgggtgccgtggctcactcacacctgtaatcccagcactttgggaggctgaggcaggcggatcacctaaggtcaggagttcgagaccaggctgactaacatggtgaaagcctgcctctgctaaaaatacaaaaattagcagggcatggtggctcatgcctgtaatcccagcactttgggaggccaaggcaggcagatcgcttgaggtgaggagttcgagaccagcctggccaacatggggaaagcccatctctactaaaaatacaaaaattagctgggtgtggtggtgcacacctgtaatcccagccactcaggaggcagaagcttgagaatcactttaacctggaagtcagaggttgtagtgagctgagatggcaccactgcactccagcctgggccacagaacgagatgccatctcaaaaacaaaaaaagaacctccctactaaaccagaagagtggctgggatgggaaaagattactggtccaatgttttcattatatttttcatatcatttggaatctcatacatcaagcatgccccagtactgttaaatacaatatttttactcattatcaggtcgttcaataccagttattacaggatagggaagtcagtcagagaaggcttcatagagatggcccttgagctgagcctggaagaaatgaggacctcaaggaacagagaagaatgttagtgggtaaaaagatgggctggattctgtcagattttggagaaaatagagggtagtgaagtggttaggcagtgaatgtgttccatttcatagttcaaaatgtggggctacgttttgcctacctgaacttcattattaatgtgaaaaattgaattgttgttttcagtcaccattgagaacaccaaagatacacaagtagcttagattatttatttatttatttttgacggagtttcacgcttgttgcccaggctagaatgcaatggcgcgatctctccgcgacctccacctcccctgggttcaagtgattctcccgcctcagcctccccagtagctgggattacaggcattcgccaccacgcccagctaattttgtattttttttagtagagatggagtttctccatgttggtcaggctagtctcaaactcccgacctcaggtgatctgctcgcctcggcctcccaaagtgttgctgggattacaggtgtgagccaccatgcccggccatcgctttgtgttcttaaaattaatttaaaactagaaaacttgaggaatgatggttcagatgagtgtcaaaccttgcaagatgttttttcctggaaaaggatgattaaaattggttcagggtggggccttccaggtctgctctagtgattgggtccttactgctctggtggtggcagtgataagctttttgtaacagaaggggcaaaagattgtgcttctggccaggcgcagtggctcacgccttgggatgttcttgtcaagtaactaatcttagtactttgagaagccaggtgggtggatcaccttaggtccagaccaccctggccaacatggtgaaatcctgtctctattaaaaatacaaaaattagccgggcatggtggcaggcgcctgtaatcccaggtactcggggtctgaggtggggaaaatcgcttgaacccaggagtcggaggttgcagtgagccgagatcatgctgttgcactcctgcctcagcaacaagactgaaactctgtctcaaaaaaaaagattatgcttctaagaatatgacccattgcatatggacgctggtctttaaagcttggatttaaaaataagtttttttgtaatgggttttagaactttttttctttttttttgagatggagtctcactgtcccccaggctggagtgcagtggcgccatcttggcttaccacaacctctgcctcccgggttcaagcgattctcctgcctcagcctccccagtagctgggattacaggtgcccatcagcccgcccagctaatttttgtgcttttagtagagatgggggttttaccaccttggccaggctggtctctaactcctgacttcgtgatccacctgcctcagcctcccaaagtgttgggattacaggcgttagccaccacgcccggccagaaagctttttcttaatgccagttatcataccctttgctttacagtttgcatatacctcacagctggctttgtgccgtgtgcgcgtttaatatgctctcagtgtactcgtatgtaggaaaagctttaaaatagtccaataaatgtccattttgcaaatctcaggatcatatcactttcacgtatctagatgccctcaaaccgaaaattcagatttcagttaaggcctttaacttaacataggactttgattacagagatgtattttgctttgacagaagttaaggttaatgtcttaaatttccagagatgagaatataatttctataacccagtaacccatttaacttcacttagattatcaattttcagccgtgaacaggccacttagtttctctgataagtggcctcttcatctgtaaaatagcagatctgtgtttcgtgtttctttttgtgtcaaagatcgaatcacttgtagaactattcagtcagaatcaggatttcttcccctttccattgaagatggtttgtggtgttcgtagcataactggtcttgtctgctttagtcttaattttttcaagtgatagtctgttgtctttttgtgtgtgtcactttttttttttttttgagacggaattttgctcttattgcccaggctggagtgcaatggtgtgatcttggctcaccgtaacctccgctccccgggttcaagtgattctcctgcctcagcctcccgagtagctgggattacaggtgcacaccaccatgcccagctgatttttgtatttttagtagagacagggtttcaccatgttggttaggctggtctcgaactcaggctggtctcgaactcctgacctcaggtgatccaccagcctcagcctcccaaagtgctggcattacaggcgtgagccactgcacccggcagtatgtgtcacttctttgtctactcagagcatagtggttcatacctgtaatcgcagccctttgggatgccaaggtgggaggattgtttgaggccaggagttcaagaccagcctgggcaacatagagtgaccttgtctctacaaaaaaaaaaaaaaaggaaatacatatataacaagtattaaaaaggatcacacttaatttagttgtcatgtaaattgtggttaaatgccttttctagaaaagtgataaggtattttaaaaatttgatacaacatttagcctggtaatagaaagttcactaatgtgatacagtagtatctttctcaataattctctattctgatacctaggttcttctgtgtggcagttcgggatgatggatcaagctagatcagcattctctaacttggtaagatattttcagttgtatttctgtctgcaagaatgtgaaatatacaagcatgacttgaagcatgaaataataacccaaatctattatcaggtattcatttacatttgaattggtcttgaggcataactgatcccacagagttcagccttcaatagggttgattatagaaggtcttggaagaattctcagcgtggttctgggtgtggtagaggggcagccgagtagacaaggtgaactaaagaaagcgctgatcaaaatgtctccttagtgagagaggtaaaaagcaaagttggccgggcgtcgcggctcacgcctgtaatcacagcactttgggaggctgaagtaggtcaatcacctgtggtcaggagttcaagaccagcctgaccaacacggtgaaactccatctctactaaaaatacaaaaagaaaaaaaaaaaaaattagtggagtgtcatggcgcacgcctgtagtcccagctactcgggaggctgaggcaggagaatggcttgaacctgggaggtggaggttgcaatgagccgagatcgcgccactgcactccagcctgggtcacagagggagactccatctcaaaaaaaaatgaggccaagtgtggtggctcagtcctgtaatcccagcactttgggaggtgaggcaggaggatcacttgaggagtttgagacttgcctgggcaacatagcaatcccatctctatttaaaaaaaatgaaattttaagaaacattgagtagacagtatgagcgaaagctgaaagaacatacagaaaagacagccatccaggacatgatgaaaaggagcctaactcttgacacactatctagacctcaattctctcttttatttatttattttttgggatggagtctcagcgtgggctcttgttgcccatgttggagtgctcaccgcaacctccgcctcctgagctcaagtaattctcctgccttagcctcctgagtggctgagattacaggcgtgcaccaccatgcccagctggtgttttgttttttttttttaatttttaatttttaaatttttaaatttttttattttagtagagacgggatttcaccgtgttggtcaagctggcctcaaactcctgacctcaaatgatccgtctgccttggccccccagagtgttgggattacaggcgtgagccaccgcgtccggcctattctctcttttctgtcttctatcttatgcttagtcagaatttctgcttatttataaccttgttttattcttgttccctggctcccgccagcatcatggtctgggttactgcatagtatcctaaagtgatttgtgcccctagtcccagctgctcaggagactgagacagcagaatcagtagagcccaggattttgaggccgcagtgagctgtgatgacaccactgcacttcatcctgggagagagagggagaccttgtctcaaaaaaaaaaaccaaaaaaccatttacagaaaaggaaagactgattgagaagaccagtgtgaactagcccttgactgggcccagggaagaatgttggtttgaaaggaaaacactgaggaatacatagcaagtcatagtaatggcccaataacaagcatatacctaagcaagcttttcctaaacattcctgtgcctgttcttcatcatgcctttttccccaaaacagtttggtggagaaccattgtcatatacccggttcagcctggctcggcaagtagacggcgataacagtcatgtggagatgaaacttggtgtagatgaagaagaaaatactgacaataacacaaagcccaatggcacaaaaccaaaaaggtgtggtggaaatatctgctatgggactattgccgtgatcatctttttcttgattggtaagaatgaccattccaaacttcaatattttccataaccaactctgagaagtctgttatttcagttcagcatatagttattttgtgcctttttgttttgttttgttttgtgacagtcttactctgttgcctaggctagaatgcagtggcaccgtcttggctcactgcaacctctgcctaccaggtttaagcgattctttgcgttagcctcctgagtagctgggactataggggctcaccaccacacccggctaatttttttttttttttttgagatggagtctctgtcgcccaggctggagtgcagtggcgtgatcttggctcatagcaacctctgcctcctgggttcaagcgattcttttgcctcagcctcctgaggagctgagactacaggtgtgcgccaccacacctggctagtttttgtatttttagtagagacggggtttcaccatgttgggcaggctggtctctaattcctgaccttgtgatccacccaccttggcctccgaaggtgctaggattacagacacgagccacttcacccgtccactttgtgcctttttaagtcccactaggaagacaatcatgagtagattctatacctgtcattgaatttagtctggttggagagagagacccatgaattctttcaatacgacgagcaagtgttttctttttatttatgtatttttttgtttgctaccactccaccaggaaacaaatgttacactaaaacatatacacaggatactggtggtgtagaagctcagtctgatgtttcaaggaggtcttttggaaaaagtacctatgttttgaatagctagctatttgcaataaagctagtatacagttcattaagtggcttaaagtatacaaaactgagatgcattatatactttaaaactacttagaatttgaaaaccagtattttcaaggcttacctgaaaagtattaacagggatagatcacaagtgaaattctgagttcagctctggaactttgtctctttagggtttatgattggctacttgggctattgtaaaggggtagaaccaaaaactgagtgtgagagactggcaggcaccgagtctccagcgagggaggagccagaagaggacttccctgccgcaccgcgcttatactgggacgacctgaagagaaagttgtcagagaaactggacaccacagacttcaccagcaccatcaagtgagcatgagctactttgcaagtatctagatgagtaattcaggaattatgataggctgcagggaaacaataatggtgacactgtgggaatggcttttcagagaagacaagacttgccatgtttagctaaagagggtgaggggcctgtaaagaactgaaactatactggtaggaaaaaaggtagaacttctagggagtctcctttttcttaaaaaattcataggcccttgatgttttcccgatctttgtagcttattgcttgctgtcattctttggctctgatttttcttcttaatctctttttttttttttttttttgttttttgaggagtcttgctctgtcgcccaggctggagtgcagtggcacgatctcagctcaccgcaagctctgcctcctgcctcagcctcccgagtagctgggactacaggcgaccatcaccacgcccggctaattttttgtgtttttagtagacacagggtttcactgtgttagccagggtggtctcgatctcctgacctcgtgatctgcccgccttggccttccaaagtggtgggattacaggtgtgagacaccgcgcctggctcttcttaacctcttataatgttgtactaagctctcctttgttgacaagggcatcagtagcttttctcttttatgggaaacaacacatgccagaagtagcctttttcatcttctagatcatgggtaatttaactgcctgacttaagtctctagtgcttcttagtttctgctgatactcacccattaacccataggccaataagtatccagagacagtgtctccctctggtggaggctggaatacagtggtacgatctcatctcactgcagcttcaacctcccaggctcaaacgatcccgccaccatagcttcctgagtagctgggactataagcacgcagcaccacacccagctaatttgttttttaagagacggagtctcaccatgtcttccaggccggtctgtccttagatttttatttttatttatttagttatttattttgagatggagtcttcctgtgttgtccagactggagtgtagtggcacgatctcagctcactgcaacctctgtctcccaggttcaagtgattctcctacctcagtctcctgagtagctgagatcacaggcttgtgccaccacactctgctaattttgtttttggtagaaacgggatttcaccatgttggccaggctggtctcgaacttctgacctcaggtgaccgaccctcctgcctcggcctcccaaagtgctggaattacaggtgtgagccaccacacctggccagatttttattttatatttatttattttatttttaatgggctttctggcaaaagccagaaagcatgctagacagattctaagagctgtaacacttgtccatatagttttactatctttgcacatccatgcctctgtgcaaataataaatttatcttttccttttttcgagcttcctatagttagcgtggtactgtaattctttagtcttaagttatggcattttctacttcatctagttgatgcttttgtgcttatttactgtacaccagatattatggataaagtgagaatatagtccaccccacaaacatgtgagaactaatatgctgagtaaatagaaagagcgatgggagatcagaccaaggagcagctttgcttcagggtattcagaaatgcttcacaagtaggtgaaaattgaaactatgcaccctgtttagcacagtagtactatcttagattttataattgactttatagtagatctcctggaagctactcatttcccctcagcagatacattatgatgaggctcttgaaggggtcctttatagtgggtaaagaagctgtgaagttataaattaagatttggggcacagtttttttttcttagtttgtgttaatctagaagttttgggtcacagttcgtttatctaaactatgagggataatattttgctttcaaaacaatttgtttaatccttgagttaaatgtttattttaaattaaacttaagtttatttaaaagacattttctcctccaggctgctgaatgaaaatttatatgtccctcgtgaggctggatctcaaaaagatgaaaatcttgcattgtatattgaaaatcaatttcgtgaatttaaactcagcaaagtctggcgtgatcaacattttgttaagattcaggtcaaggacaggtatgttgaaagatggtaaacttatttttatacaagtagctattttcaggtgtgctaaatatagcaaagactttttgttactgttgctttttttgaaacagagtcttgctctgtcgcccaggctggagtgcagtgacacagtctctgctcactgcagcctctgccttctgggttcaactgattctcctgcctcagcctccaaagcagctaggattacaggtgtacacctccatgcccagctaattcttgtatttttagtagaggtggggtttcaccatattggccaggctggtctcgaacttttgacctcaggtgatctgcccgcctcggcctcccaaaagtgctgggattacaggcgtgagccaccacacgtggcccaaaggcttttaaaataaaaattaagcttaagatttagaggtaaatttcctgaagccaaataatgcaagacatactaaatgtaagctgttgtgttttttggaaggatgaccttaggcttattttaacttcatctttttaacagtgctcaaaactcggtgatcatagttgataagaatggtggacttgtttacctggtggagaatcctgggggttatgtggcatatagtaaggctgcaacagttactgtaagtaaggcaaaacagtgcatgagatgcttttccctcttgaatcattcaaaactcatcttttctattcttaggagttatacatttacttgtaaaatgtaaattatcgagagatattttggttttcaaccctctaatgacacagtcaacatgcaatgtcttctctctctaattactttccccatatcctgctttattttttctttatggtactgatagcacctgacattatctatacctttgtttccgttagaatgtgagccaaatgaagaaccatgggttagttctatttactgccatgtcccagagctttggagaatggctgaccatacatagtagtatttgctaaacaaatgcatatcctccctgtggggacagatctaaatatccatcttggatggggcctagtcttagcttgattcattaatgcttgatctttttttatttttgttttgagacagggtgtcactcttttgccttagctggaatgcagtggcgtgagcttggctgactgcaacctccaccaccacccaggctcaagtgaacctcccgagtagctgggacgtcctgctaatttttatttattattattattattattattattattattattattatttgtggtagagacagggttttgccatgttgaccaggctggtcttgaattcaaactcctgggctcaagccattcatgcacctcggcctcccaaagtgctgggattacaggagtaagctgctgcacccagcccttgatctttttaaacttaggcagatacagtcaaattaacacagaaatagagaacagatagatggaataattttcagcttaaaaatcacatttgtggttgggcgtggtggctcacgcccataatgccagcactttgggagtccaaggtagacagatcacctgaggtcagagacaagcctggccaacatgttgaagtctactaaaaatacaaaaattagctaggcgtggtggtgggtgcctgtaatcccagctacttgggagactggggcaggagaatcccttgaacccaggaggcggaggttgcagtgagtggagattgcgccattgcactccagcaggagcaacaagagcgaaattcatctcaaaaaaaatcacatttgtgagtcgggcatctccagtggatacctttcgaggcgggcgcaggtctgtggtgattccttgcctttctggatacttgtgctttatcactttgcctggctgcctgtaagccaggagtttagagatggtagattgttctgctaaagaacattgaagatttttcttcagcttccagctttctgtgttcaggtgcttggtgttagtgtctgtctatagctgttcatctggactcttcttagcttaggaacataatgacacatccaaagttggtgtatgcaagtcactttgttgtaacagatggtattttaattttgggacagatgtattgtcaggtctttcggttaaaacctctttctatgatgtcctcaaggcgaagattgttccaggcctccagtcccatgaccagcctacacaggcctctttaatctaagtgccctttacatgaaaggcagtgtggaataaaagcatgaaagacataggaggctaaaacttttgattttattctaatacctctgacctaaaaattataaagttttttagaactcatgtcttttttaggccttggcctccttttatctcttacttggattgcctgtcttaggtttgatctataaaactcttttgtctcaagattttagagctgttccaataccataatgctcattaaatctaatgtctttgttctagggtaaactggtccatgctaattttggtactaaaaaagactttgaggatttagactctcctgtgaatggatctatagtgattgtcagagcaggaaaaatcacctttgcagaaaaggtgagtgtgggttattttatatatatatatatatatataatattcaatacagtactttggtatcttactcttcaggtaagttatatttcttgttaatattcttacattctgaaaaccagcgatcttaaactctcataccagataatataatttattaaaagtgctaagcaggcgggcggggctaagctgaatccagccttgggaggccgggcgggcgatcgcaaggtaggagatgagacagtgaaacctctctactaaaatacaaaattaggggcggtggggcgcctgtagtccagctactcagaggctgagcaggagaatggcgtgacccgggaggcggagcttgcagtgagccgagatccgccctgcactccagcctgggcaacagcgtgagactccgtctcaaaaaaaaaaaaaaaaaaaaaaaaaaaagtgctaagcaaatcaaataagttccacttccctaatcagaaatgcttaagtgaaagctgtttgtctgtataactcagttttatgcatatacagaatacagttaaaagcatgttttataaaaaggaaaataaatagccaaacatacacaaggaactagattggaacatatcaaaggacagtggtgatttctgcatttttaaagaagtggcagggctcacacttgtaatcccaacacttggagaggctgaggtgagaggactgcttgagccctggaggctgtgagatgtgacttgtgccactccagcctgggtgacagtgggactcaaaaaagtggttgtcttagatgggtttttgttatttttcttttcttttctttttttttttttatttgagatggagtctctgtcaccctggctggaatgcagtggcgtgatctcagctcactgcaacctctgcctcccgtgttcaagtgatgctcctgcctcagcctcctgagtagctgggattacaggcgtctgccaccaggcccggctaatgtttgcatttttagtagagaggggatttcaccaagttggcctggctggtcttgaactcctgacctcaggtgatccacctgcctcggcctcccaaattgctgggattacaggcgtgaaccaccactcctggccttcgttattctttgtttttttttttttttttgagatggagttttgctcttttgttcaggctagagtgcagtggcttactgcaacctctgccttacagtttcaagcaattctcctgcctcagcctcccaaatggctgggattacaggcgcctgccactaagcccagcaaatttttgtatttttaaatttctttttttttttttttttgagacggagtcttgctctgtgccccaggctggagtgcagtggcgcgatctcagctcactgcaagctccgcctccccgggttcacgccattctcctgcctcagcctcccgagtagctgggactacaggcgcccgccacctcgcccggctaattttcttgtatttttagtagagacggggtttcaccgtgttagccaggatggtctcgatctcctgacctcgtgatccgcccgtctcggcctcccaaagtgctgggattacaggcttgagccaccgcgcccggccaaatttttgtatttttagtagagacaggatttcaccatgttggccaggctggtttcaaactcctgacctcatgatctgcctgcctcagccttgcaaggtgttgggattacaggcgtgagccaccacgcccggcccgttattcttactttgcaaacaagtgagttaatttttcaggaaacaattaacaacacattactagataaacaatttgaaatatttggaagtattctgagtttagtcctctgtaaccatttggcctttagcataatgtccaagatgtattctcatttcatatgatcagattttcattttctgagctttatatgttttcttttaggttgcaaatgctgaaagcttaaatgcaattggtgtcttgatatatatggaccagactaaatttcctattgttaaggcagacctttcattctttggacatgtgagttatttcttgagtaaatcgctgttttgagttctttgaattgttcttggattcctatattagcagaaatagcactgtgtcttccttaaatgctctttttctgggagggcattagcagtaagcaagaagatagattacattgactttgaggctttattatttgttggtagaagtactttatcaatagtaccttgaactgagaatttccatgtgccatgaaaacaggagtcacattgtatagccactcagatttttgaggcttcaagttggtaaactaaggttgggctgcagccttataccaaatccgaatcttataccaactccgaatcttacagagaacttttgaggaagtatgtgatggagcgaattgctctttgtttttctaggctcatctgggaacaggtgacccttacacgcctggattcccttccttcaatcacactcagtttccaccatctcagtcgtcaggattgcctaatatacctgtccaaacgatctccagagctgctgcagaaaagctgtttgggtaagtttttatttgaaagctgtcttgcagggtgaggttttatggttagggaagaacggtaatatgttgattaaaatgttaaacatgattataattttccacatttgggaatttggaagatagttagctgttaccttggtatagataaaaatgaatttttctctataaagagatcttaataatggacttacaaatgcaggagaataaggagacttacaaccccagtgaattccttgtgcaagattcctggcataacttctgctcaagtacttctgtgctgaggcacgatgcctgtggcaacccattcagttagtggagagaatctgttagaattcatattgggataaaatcccattccctgaaacatccatttgtctggatttttcttctaagcaacacgggatgattccagtttccttgtctgtagattgagaagcctcacttctcatgctggtttccagagaaaccatttatggtcatggcgctcctggatatcctccctgtagtgttagtgttcctctttaaaaacagcccagttctgttacagtacgtagcattaattttgatttggatgtggacatatttctcatttcctgttataggatagagatcgagtttcagacctttatgaaagcatttatctcctgtatgacataggctctctgatcctgtttctttaacataattcgatagtgaaaatatattctacttgatagtctcaaatgaagaacgtctgtatgtaaggactatgtgaaataccatgactattgatcatgctaagaggcctttagcgtaggggagggagtgtgtaacatactatggccattgataatgctaagaggcgtttagcataggaaggagtgtgtaacatactatgatcattgataatgctaagaggcctttagcataggtgatttttgttgactcattctacctaccacctacaagtcgtaaccaacctgtgaagccagtgacgcatcttacccttatgtagtaggggagtaataatgtttcaacctatatttgtgtaattaagcccccttaggaacagctattatttggggtaacacagaggaattagatgggggaagcataggattttttttttttttttttggtgatagtcttactctgttgcccaggctggagtgcagtagtgtgatcctggctcactgcaacctccacctcctgggttcaaggaattctgccttagcctcccaaagtgctgggattacaggcgtgagccactgcacccagctgaggaatattttttataactgagataagaatgtatactatccttattagtggtgacagttgggaaacataaaaatgtattactatccttttatatattaaaagaacttcattttgagtccatcttggtatgtattccaaatataaactacataactatatctggcggaaaggcatatatcagatgaggacagttggaagttttgtaaaatattgcttaaactaggaattcatggttttcagttggctgcctacagatcaaagtaagacacaaatggttcaccactacagagtaagtttgtttttgtttttgtttttgagacaggaattttgctctgttgcccagggtagggtgcaatggtgtgatctcggctcactgcagcctctgcctcccaggttcaagcgattctcctgcctcagcctcctgagtagctgggattacaggcacccgccaccatgcccagttaatttttgtatttttagtagtaacggggtttcaccatgttggtcaggctggtcttgaactcctgaccttgtgatccacctgcctcggcctcccaaagtgctgggattaaaggggtgaggcactgcgcctgcccgagagtaagttttgtttatatgtcctcttaatctagagcctcactagacaaaagtaaactttgggcaaggaacaataactcagaactttctggttctagaaatatggagggagactgtccctctgactggaaaacagactctacgtgtaagatggtaacctcggaaaacaagagtgtgaagctcacggtgagcaatgtgctgaaagagacaaaaattcttaacatctttggagttattaaaggcttcgtagaaccaggtaaagaccgcccccacccctcttggttttgttgttgttgttgttgttgttgttgttgttgttgttgttgttttctttgctgttcttaaggatgtggctagggaaggagggagtgtacgatgctggcttggcttggttttatgaagtgcttaatcttatctgtcctaaagtgaattgtttatgtgtcagatttttttgtttttgtttttgtttttttgagaaggagtttcactcttgttgcccaggctggagtgcggtggtgcgatctcggctcactgcaacctccacctcccaggttcaagtgattctcctgcctcagcctccccagtagctgggattacaggcgtgtaccaccatgcctggctaattttgtgtttttagtagacagggtttctccatgttggtcaggctctatgaggtcagctcctgacctcacgtgatctgcctgcctcggcctcccaaagtgctgggattacaggtgtgagccactgtgcccggcctatgtgtcagttttactgggaggtaataaggccctaggaaattcttgttaaaaattgaccattgtgactagaaaatctattctaagttattgactagaccagtgataagcaaatttcttaagggggcagataataaaccttttgcaggctatacagtctctgttttagctgttcaactctgtagaagcaagaaaataggcatagactgtacgtaatgaatgggtatgcaggctgtagtttgccagtccctggagttgagtttaaatgcaatcaaatagccaaacctactaagaaataagaaaatgactgctggccccgctacatactcaaaatcttatttgcagatctcccatattgctgctctttgtaggttacttaaaaaaaattattcctgttctttttttctttcacttaagtagtcagtaaatttaattagtagtgtaggaaaaaagtagctctactagtaaagtaaaattaatattctcatgtgaatttttaattcccagagtttttagtcagatttgaagtaaggtgcttttattcttaatacatatactgcacttttacctttctactgatgtgctaattgtagaaaagtttagaagcttatttaaattcttcctcttttgtttttaaagatcactatgttgtggttggggcccagagagatgcgtggggccccggagctgcaaaatccagtgtggggacagctctcctgttgaaacttgcccagatgttctcagatatggtcttaaaaggtagagtacaaattttggttcctttgaatattggtgcactacagatggttctagatgttgtactgtgctttgctcgctttgcctgcattcctgtggttccctcatgccagactctagttcttaaatacaaggcagattgtcttttgttgtagctacctttttctttgaaacagctttccataaaatgtcttagctgtgctaaaaatcaccagtttctttgagacagtggattattgagccctagtgcttagtttgatgtatccagcatgataaggcggaccatagtccctaagtaatctatttgaaagcagtagcatacctctatactcatgtactgaggcctaacagctattgaaattttatgtttattcatttattttttgagacagagtttaactctgttgcccaggctggagtgcagtggcacgatctcagctcactgcaacctcctcctcctgactttaagccattctcctgcctcagcctcctgagtagctgggattacaggcgcccaccaccacgcctggctaatttttgtatttttagtagagacggggcttcaccatgttggccaggctggtctcctgacctcaagtgattcacccgcctcagcctcccaaactgctacgagtgagccaccgtgccccgcctgttttatttttgagcctttctgtcctgcttgccactctttcacactcctacccacccacacattcaaaatcatcatattcttgaatctttgggtcacaaggcaaattgcaatgcttatctttatttaatacagagtacattaatggagaaaaaaaaatactgagggaagtgggtgggatggagggcagtgatatatgtatccccaaaaggcgctgtcacaagtgtagtttctctgcaaactcttcttataacttaaatttgtgaatttttattttattttagagttattttttaaaaatccaatgttttgatttacttctatgcaaattattctcaagatgtgcatcatcatgcttacactgttttcagtgatctctgggtccagaagttaaggaactgaaagaatgaaattgtaaaagggcgactactggcccctgctatgtactcgaaatcttatttgcagatctcctatattgctttttgtaggttgcttaaaaaaaaattattcctattcttttattctttcacctggagtctcaaagattttgttagtattttttttttcttttttggctcagaaaagaagattttggaatctgctatcttggagttagactttctgattcatctgaagtaggataccttccatccttgcccgtgtataaccgttcccaagataaagctaactttcttctctttcagatgggtttcagcccagcagaagcattatctttgccagttggagtgctggagactttggatcggttggtgccactgaatggctagaggtattctttatcatcatctattcccatattgggcacctgagcttgtgggttcaggctgtcctccagaaatgatgttcttttaggtttgattttaccatgtttgcctttgcgcttagtctcaatagagtccagaattgaaaatgaatccctattgctactgtatgtgataaatgaacagatttgtacttattagtgttttctcttctagggatacctttcatccttgcatttaaaggctttcacttacattaatctggataaagcggtgcttggtaagtatccctttgtttagctgtttatgaattcaggtaaattactttttttttttttttttgagatggagtttcattcttgtcgcccaggctggagtgcaatggcacaatcttggcccactgcaagccccgcctcccaggttcaagtgattctcctgcctcagcctcccaagtagctgggattacaggtgctcactaccacgcccagctaattttttgtatttttagtacaaaaaattgactatgcttcactatgttggtcagtatggtctcgaactcctgacctcaggcaattcgcctgccttggcctgggattacagacgtgagccaccatgcctggccgggtaaactactttgaagtggaaggaagcttttttttgagacagggtctcactcgattgctcaggctagagtgcagtggcgcaatcttggctcactgcagccttgacctcctgggctcaggtgatcctcccacttcagccacctggctaatttttttttatagagatggggttttgccatgttgcacaggctggtctcaaactcctgagttcaggcattctacttcggctgcccaaaatgctgcggttacatgcgtgagccgttgccctcagcctgtatcttaaccttcctttaaatagtcggtcaagttacacaatgaacacatattgccttgtctagagcagtgggtggttctcaatgtggcccccagatcagcagcatcaggaactgttacaatgcaaactttcaggtccaccccagacctttgagtcagaaatgggagtgttggtctaaaaactgggcttttttggctgggcatggtggcgcacgcctgtaatcccagcacttggggaggccaaggcaggcggatcacctgaggtcaggagttcgagaccagcctggccaacatggtgaaaccccatctctactaaaaatacaaaaattagctgggcgtggtggtgggcacctgtaatccctgctactcaggagactgaggcaggggaatcacttaaacccgggaggcagaggttgcagtgagccgagatggtgcctttgcactccagcctgggtgacagagcgatactccatctcaaagaaacaaacaaaaaaactgggctttttttttgggcaacctttggggaataaaaacttactattttcttaaggacaaagtatcctgaagcaaagaaacccaaacaaataaacaaaaaactttaacaagcatgccaggtaattctgatgcactaaagttttaggaccataagtctggactgttttgaggtgagaagaaactaaactatgccatatagaatggtacttagagagtaattcacatcctgttatgttgtggcatcactgatagaaatattggataatcatacttctagaagagtttgaatgttcactggcagcagaaaattgacagagtttgagtgttatttaaagtgcagattacattcaacaggaatgggttaaagaaagtgcagatgtagctgatgaactgagaatagtgaaatgtctacatggggggaaaaaggaaagagttacaattaagcctctaggttagttatttccctgttgtgtgtttgcagcagaatgtgctgagtatagcaagcatgttgtagctctaacctgggtgaaccagaaagttaaatgtgaaattgctaatgggggaggctgcacatgtgtcggggcagtggatttatgggacctctaggtacctttatcttaattttgctgctgaacctaaaactgctgatatttttaaaaagatcactaggattaaagtatgcaaactcaaggagtagtaagagcctcacttgagtcaagttatcatagttgctaaagaacttgataccaaaattacttttgtctacttgatgaataggatagctgttgcgtagggccactgatgtagattactgtcttgtcaagtacttgtagaagtagcagtgtgaaaattactggagtggagaaggggcaatgataaaataatttcttttcaggtaccagcaacttcaaggtttctgccagcccgttgttgtatacgctgattgagaaaacaatgcaagatgtgagtatatacctcattacaaaaatggatgacttaattttttgttgaatcgacctgagataaaaaacactgatatgtaaaaccatagtcagtaacaaaaactaggaattgagaataaattctatagcagcatcattaaagagatacttgcctgttgaaccatatgagatgaggaggtatatgaagggctgcaatctcaaaaaatatgtcgtctctttaggaatatataacaaaatgccatgaggcctgagctgtagtgcaggtgcccacaggggattgtctgtagagtcacaatgctaaggaaggctgaaatcaacttgaactatactttgagaaagccgtatgaaatattcattgaataaagaattaccatagttttgagtgagggagcagcatatgaaagaaaacatttgcttaatgggattagaggctgtgtattggagtgagtaaagttagatacaggtcagacagcagatattggctttgatcccaagggatactagggattataggatctcaagcaaggcaataatgaatttaccagttaggttggtggcataagatgcactagaaggaagaaaccagaaacaagataggcatattatggagcctaaagagggcttttacaattgtgggtatgccaccgtggttttttgggtgcttttttttttttttttttttgagacggagtctccctctgttgcccaggctggggtgtagtggagcaatcctggctcaccgcagcctccgcctcctgggttcaagtgattgtcctgccacagcctcccgagtagctggaattacaggcatgcaccaccacacctggctaatgtttgtatttttagtggagacggggtttcaccatgttggccaggatggtctcgatctcttgaccatgtgatcatcccactcggcctcccaaagtgctgggattacaggcatgagccactgtgcccggctttttttttttttttttttttttttttttttttttttttaagagacagggtcttgctctgttgcccaggctggtctcaaacttctgggctcaagtggtctcccaccttggcctcccaaagtgttgggattgcaggtgtgaactaccccacctggcctaggcccacttttaaaatgttaattaagaaggaaacattttttcctaaccaaaaaaaaaaaaaaaaaaaaaaaaaaaaaaaaaaaaaaaaaaaaaaaaaaaaaaaaaaaaaaaaaaaaaaaaaaaaaaaaaaaaaaaaaaaaggaaacattttttcctaaccataactaaaggaactgaaaacatgagcctagttagtaataacttaaaattgagactgttttaactgtcataaataatttcttttcaagaagatataatacaagttttctatttataaatttttatagagtaacatgttagtgactagcctgaataaataagttccaaaaggttagttttaatgataatttcttatcttacaggtgaaacatccggttactgggcgatctctatatcaggacagcaactgggccagcaaagtgtaagttgagaaaagtgaatgaacaaactaatagaaaagcagagattctgcctcctgtgtcaagtagaatccaaatctgtccttgcattgagcttacttacacctaaagatactcaactaaagaatttatttcggatgtgaggactagcatgatagaacagtcttctttagaaaactttctaaagacacatcctttcttcttgcagtgagaaactcactttagacaatgctgctttccctttccttgcgtattctggaatcccagcagtttctttctgtttttgtgaggtaagtctgaggaacccaaaaccaaaagcattccatcagttcatttaaatgacaaatggagagaggctctctaaaagaaatgatctttatttgggaatgggaaagtacatgggaatgtgctttattcagagaggtaaaggaaagcaagtttttaaaggacaaatgacaaggattacataattattttgaggtaattattcttgactaccaagatcagtcaaggtttacaggcagttgctcggcagattttctcacaagagaatttttttggtgcaaggtgtcagtggcctctgtgtaaggttgtattttcgtaaaaaggaaaacaaaaacccttagtccttgttatcagacatagaagggtgagacccttctcttcagggttgcatttttgttaacactagtgactccattttgcttttgcacgtatcttagttgttggggtttttttgtttgttttttgacaatgatgtcttgctgtgtcaccaaggctggggtacagtggcccaatcatggctcactgcagtctcaagccgtcttcccccttcagcctccaaaccgttcggattacaggcaagagctacttactacacctggccatggatcttcttgtgtcaactttgagaccaagtttactggagtgcttaaaatgttttttttttttttttttttgagacggagtcttgctctgtcgcccaggctggagtgcagtggccggatctcagctcactgcaagctccgcctcccgggttcacgccattctcctgcctcagcctcccaagtagctgggactacaggcgcccgccacctcgcccggctagtgttttgtatttttttttagtagagacggggtttcaccaggttagccaggatggtctcgatctcctgaccttgcgatccgcccatctcggcctcccaaagtgctgggattacaggcttgagccaccgcgcccggccttaaaatgttttaagaagttatacacaagtgctggacgtggtagctcacgtctgtaatcctgtagcaggaccagccgcagacaaaaccccccagacaccgagttaaagaaggaagaactttattgggctggaagctttggcaagactcacgtctctaaaaaccgagctccctgagtgagcaattctgtcccttttaagggctcacaactctaagggggtcggcgtgagagggtcatggttgatcaggcagtgggaacgtgactgggggctgtatgtactggtaatttgaacagaacaggacgggggttttcacaatgcttttccatacaatgtctggaatctatagataacattacccgtaggtcaggggtcgatctttaactatgcccagggtgcggcgctgggctgtctgcctctgccttttagtttctacttctttctttgaaggcagaaattgggcataagacaatatgaggggtggtctcctcccttaatcccagcactttgggaggccaaggcaggcagatcacgaggtcaggagtttgagactagcctgaccaaaatgttgaaaccccgtctctgctaaaaatacaaaaaattagtcagatgtggtggcgggcacctgtaagcccactactcaggaggctgaggcaggagaatggcttgaacctgggaggtggaggttgcagtgagctgagatggagccactgcactccagcttgggcgacagagtgagaccctgtctcaaaaaaaaagttatacacatgtaattattgcatgttccttcattatcagttttaatattagcttaattagcatttgagtttattgctaaaacttctttaagtatgagttttaataatgagtgtggtgggtcacacctgtaatcccagcatttgggaggccaaggtgggtggatcatttgaggtcaggagttgaagaccagcctggccaacgtggtgaaaccccatctctactaaaaatacaaaaaaattagctgggtgtggtggctcatgcctgtgatcccagctactcaggaggctgaggtggaagaatcgcttgaacccaggcggcagaggttgcagtgagccgagatcgcgccattgcactccagcctgggcgacacagcaggactctgtctaacaacaacaaaaaaacgaggctgattttcttgagtgattgagcagtggcctgcctattggacagtccagctgaacagtattttcatcaggctgggtgcaatagctcacacctataattccagcacattgggtggctgaggtggccaggagtgagaccagcctgggtaacatgcctagtctatatctctacaaacatttttttaattaagctgcccagtggcatctgtagtcccagcttcttgggaggctgaggcagggggtgtcccttgagccaggagctcaagcctgcagagagccaggagtgcatgagcacacgctagcctgggtgacagagtgagacctcgtctcaaggtacatttcatgtgtgttctctttttccatgataaaggcccaaacttcccagaatgaaaaacgtacagccgtaagaatttggctagaaatctattcgaggcatatgatacgataggacagggattctgtagaatctggaagaaagtcatcactctaggagtgggttagattcagagaagtagcaagaatgtacttaaagcagcagataacgagatcacactggggtgggaatgtgttagaagcagcggggagctgtagtaacttacctcgatggggaagccagaatgtgaggcttttgctggtagacctcacctgagtgccatagcctcgctttttcttgcaggacacagattatccttacttgggcaccaccatggacacctataaggaactggtggagaggattcctgagctgaacaaagtggcacgagcagcggcagaagtagctggtcagttcgtgattaaactgacccatgatactgaattgaacctggactatgagaggtacaacagccagctgcttttgtttttgagggatctgaaccagtacagagcagatgtaaaggtgagcactgattccaagtatgtttttactgctgaatgtcaagtagtttgaagtgtgatgtgttcctatgtgttcctggtgggtggaaggatgattgtagccaaagtacattttaaagtgaacggaggcacaattttacatagaatttgtaacttgtttgacagaagttgggaggctgtggatcagagacataggacagagctcagcagtatttcggaatctagagcaatgtcaggttttctatcactcatgtctcccaggcagcccgccacagagtatgacggtctcacaaggagttgggctgtgtgcgtttcagacatgacgtggatggaaagacagcacagctaggaggattctgtctcgtattgatcctgtgcatctaaaattcaaatattccattaagtgaagctgataagcagggtgaggtggtgcacgcccgtagccccagctacttctgctgaggcaggagaattactggagcccagcctggtcgacatagcaaaatcccatctctaaataaattaataaaattaatattaagtggcttccagatagttttatggtactaggagttgattttttaacagatctcttaattgaagtaaatcactcataaccaaatctttttatgtttgtcttttctttttctttctttttttttttgagagacaaagtctcactctcgtcccccaggcagaagtgcaatggtatgatcccggctcactgaaacctccgcctcccgggttcaagcaattcttctgcctcagctccccaagtagctgggattacaggcgtgtgccaccatgcccggatagtttttgtatttttagtagagctgaggttttaccctgttggacaggctggtttcaaactccttccctcaggtgatccacccgcctcagcctcccaaagtgctgggattacaggtgtgagccaccgcgcctggccccttatgtctttcttgaaactaattgtaactgttgaaaatggaacttaccagatggagataacgatcctgaagtacattgaaccacaatgttttcccctatagggaagttttcccccagaaggagaattgaactggaaacaatatagtacataggattgtataattatgtttaaattcctaatgagaatggttttcttacatgctgggctgaaatagagtgtatatcacagtctatagagcttggaaccctgtgcaaggtgcttttggagtcttgagcttatctgcgagttccttttatcagaatcttattaacacacgttaaattagaaaggcacgcaaaagagcgtccttagaaacaaaactcatagcgaagaatgtctgtttcaggaaatgggcctgagcttgcagtggctgtattctgctcgtggagactttttccgtgctacttccaggctaacaacagatttcaggaatgctgagaaaagggacaagtttgtcatgaagaagctcaatgatcgtgtcatgagagtaagtgaacttttgggaaaggaggaactaaagtatgtgtaaaattttagtggataaatcttccacttccgcagagtggacaaactctaggagtctagaattccgttaagaagggaaggaggagcattaatggcttagctgtcattttctatttctgctaattcagaccttggccaaacctagtcttcttggaagagacttgctgtaaaccttccgggtatactccagtggggaaaagaatctgaacacatttaaagttttccttcataaaatgaatccgtttcctttaaactttttatttatttatttatttttgagacggagtttcactgttgttgtccaagctggagtgcagtggcgtaatctcggctcactgcaccctctgcctcctgggttcaagtgattctcctgcctcagcctcccgagtagctgggattacaggtgcctgccactacgcccggctcattttttgtatttttagtggaaacggagtttcaccatgttagccaggccagtcttttttttttttttttgagacggagtcttgctctgttgcccaggctggagtgcagtggccggatctcagctcactgcaagctccgcctcccgggtttacgccattctcgtgcctcagcctcccgagtagctgggactacaggcgcccgccacctcgcccggctagatttttgtagtttttagtagagacggggtttcaccgtgttagccaggatggtcttgatctcctgacctcgtgatccgcccgtctcggcctcccaaagtgctgggattacaggcttgagccaccgtgcccggcccccaggccagtcttgaactcccaacctcaggtgatccaccggcctctgcctccccaagtgctggtattacaggcgtgagccgctgtgcccggcctcctttagaattttaaccttagaagattagcattagcctggttcccagcattctgttttcctcactctgctacagaaagtctgatcagctgctggactcagtggctcacgcctgtcatcccagcactgtgggaggccaagacaagcagatcacctgaggtccggagtttaagaccagcctgaccaacatggagaaaccccgtccctactaaaaatacaaaaatcagtcgggtgtggtggcggcgcctgtaatcccagctactcaggaggctgaggcaggagaattgcttgaagtcaggaggtagaggtggcggtgagccgagattgtgctattgcactccagcctgggcgacagagaaactctgtctcaaaaaaaaaataaaagagcgatcagcattcctaatttgggaaactttatgttggaagtgaacagttgttttgctacagaagtcacaggacagtgtaaattgcccgacgttttgttttataggtcgagtattacttcctctcaccctatgtgtctccaaaagagtctcctttccggcacgtcttctggggctccggctcccacacgctgtccgctttactggagagcttgaaactgcgtagacagaataacagtgcttttaatgaaacgctgttcagaaaccagctggctctcgcgacttggactattcagggagctgcaaatgccctttctggtgacgtttgggacattgacaatgagttttaaacgtgatacccgtagcttacgtcagaacagcaggatagtctagtttctagactcgtgctgattgtgctacgttttcagtagggcttcaaaacctgatgtgaaaattccatcccatcatcttggtactactagatgtctttaggcagcagcttttaatccagggtagacaacctgtccttcacgttaaagcgaataaccacttaaaaaatgtccctgatggaatattcccctctctagagtcgtaagtgctgtgtaatggtaactgcctctttcctggtggtggtaatgaaaatgtcagaaaccagttttgtgagcgatcgctgtgaactctaagggctggtctctgctgaaggctgtaaggggtcgcttacttcgagtgatcctccaacttcatttgatgccggataggagacaccaggtcgacagaccttctccaaatgagatctgagcctttccataaggaacgtagctggtttcctcattcctgaaagaaacagttaactttccgaagagatgggcttgttttcttgccagtggggtctgaaatggaggtccttctgctggatcaaatgaggctcaactgttgattgcaggaataaggccttaatatgttcacctcaatgtcatttatgaaaagaggggaccagaagccaaagacttagcatattttcttttcctctgtcccttccccataagcctccatttagttctttgttatttttgtttcttccaaagcacattgaaagagaaccagtttcaggtgtttagttgcagactctgtttgtcagacttcaaagaataatacactgccaaattttggccaaagtgttaatcttaggggagagctttctgtccttttggcactgagatatttattgtttatttatcagtgacagagttcactataaatgatgtttttttttatagaatataattatcggaagcagtgccttccataattatgacagttatactgtcggtttttttaaataaaagcagcatctgctaataaaactcaacagatactggaagttttgcatttatggtcaacacttaggggttttggaaaacagccgtaagccaaatgtaattgaataaagttgaagctaagatttagagatgaattaaatttaattaggggttgctaagaagtgagcactgaccagataagaatgctagttttcctaaatgcaatgaattgtgaccaagttataaataaatgtcacttaaaggctgtggaagtactcctgcacaattttatagctcagtttatccaaggtataactctaattcccattttgcaaaatttccagtacctttgtcacaatcctaacacattatcgggagcagtgtcttccataatgtataaagaacaaggtagtttttacctaccacagggtctgtatcggagacagtggtctccatatgttacactaaagggtgtaagtaattatcgggaacagtgtttcccataattttcttcatgcaatgacatcttcaaagcttgaagatcgttagtatctaacatgtattcccaactcctataattccctatcttttagttttagttgcagaaacattttgtggtcataaagcatttggtgggtaaatgcaaccactgtaaaatgaaattactacaa

SEQ ID NO: 399 - DNA, 32246 bp, synthetic construct
  misc_feature 1..32246: note = Synthetic
  source 1..32246: mol_type = other DNA
gtcggggaacacgtggctgctccaggaagtcgccccggggaatggctgggatccgtgggtgaccttgggcttgtaaaccttcgcttccccgggctccgggccggccccgctctcactgcggaaggggacagagctgtccccgattcggttacctggcgtgttacaggcattaattagatacgggcttctgtaaactgacccttcggctctggtaccagctggtctcgccacgctctgcctgttcgccgtgtgtggattctattttctcaaggcagaatccggcggaacgccgcaggtgttgacattaagagtattgctagcagttctcacgacaagacgggagccatgggagtcttattggtgaaagacacttggagattagcggtgtggtcagagggctgcgctgtgttgatgggcgcccgagaggccgttgtgtctcattctgctggacagttctttaaggttgggagggtgggtaagaaaatacattctgattcggcttttttcggttaacgctttccctctgctcactgcttgtagagacttgggtacgtcacttatccggggactggattctgcagctttttccattttcttccccgttgataagaggattgaagtaggaaattgtatttggccaccccatacttgtatgctaagcttactgtgaaaattaaggttaagctctctagagtgtttgtggaccctgctggtccccccaccccccgccctcaattttgggttacagtatgcttctcaagaaaacccagagttaagataatttttgtcatcgatattgcaaggttatatagagcacggcatccttcaatttcctttggatgttcttatcaagtaatggtggctgtaaacctagcctgtgttgaaggtcgttggatacacagcagtttggctaactgtgccctcaggcgaggcagttacttgcctctgataatgtatttacatgtcatggagcaaggttcccagccaaacctgaattggatcacaatccaatttatgttaaaactgattcttggttgggtgccgtggctcactcacacctgtaatcccagcactttgggaggctgaggcaggcggatcacctaaggtcaggagttcgagaccaggctgactaacatggtgaaagcctgcctctgctaaaaatacaaaaattagcagggcatggtggctcatgcctgtaatcccagcactttgggaggccaaggcaggcagatcgcttgaggtgaggagttcgagaccagcctggccaacatggggaaagcccatctctactaaaaatacaaaaattagctgggtgtggtggtgcacacctgtaatcccagccactcaggaggcagaagcttgagaatcactttaacctggaaggcagaggttgtagtgagctgagatggcaccactgcactccagcctgggccacagaacgagatgccatctcaaaaacaaaaaaagaacctccctactaaaccagaagagtggctgggatgggaaaagattactggtccaatgttttcattatatttttcatatcatttggaatctcatgcatcaagcatgccccagtactgttaaatacaatatttttactcattatcaggtcgttcaataccagttattacaggatagggaagtcagtcagagaaggcttcatagagatggcccttgagctgagcctggaagaaatgaggacctcaaggaacagagaagaatgttagtgggtaaaaagatgggctggattctgtcagattttggagaaaatagagggtagtgaagtggttaggcagtgaatgtgttccatttcatagttcaaaatgtggggctacgttttgcctacctgaacttcattattaatgtgaaaaattgaattgttgttttcagtcaccattgagaacaccaaagatacacaagtagcttagattatttatttatttatttttgacggagtttcacgcttgttgcccaggctagaatgcaatggtgcgatctctccgcaacctccacctcccctgggttcaagtgattctcccgcctcagcctccccagtagctgggattacaggcattcgccaccacgcccagctaattttgtattttttttagtagagatggagtttctccatgttggtcaggctagtctcaaactcccgacctcaggtgatctgctcgcctcggcctcccaaagtgttgctgggattacaggtgtgagccaccatgcccggccatcgctttgtgttcttaaaattaatttaaaactagaaaacttgaggaatgatggttcagatgagtgtcaaaccttgcaagatgttttttcctggaaaaggatgattaaaattggttcagggtggggccttccaggtctgctctagtgattgggtccttactgctctggtggtggcagtgataagctttttgtaacagaaggggcaaaagattatgcttctggccaggcgcagtggctcacgccttgggatgttcttgtcaagtaactaatcttagtactttgagaagccaggtgggtggatcaccttaggtccagaccaccctggccaacatggtgaaatcctgtctctattaaaaatacaaaaattagccgggcatggtggcaggcgcctgtaatcccaggtactcggggtctgaagtgggaaaatcgcttgaacccaggagtcggaggttgcagtgagccgagatcatgctgttgcactcctgcctcggcaacaagactgaaactctgtctcaaaaaaaaagattatgcttctaagaatatgacccattgcatatggacgctggtctttaaagcttggatttaaaaatgagtttttttgtaatgggttttagaactttttttctttttttttgagatggagtctcactgtcccccaggctggagtgcagtggcgccatcttggcttaccacaacctctgcctcccgggttcaagcgattctcctgcctcagcctccccagtagctgggattacaggtgcccatcagcccgcccagctaatttttgtgcttttagtagagatgggggttttaccaccttggccaggctggtctctaactcctgacttcgtgatccacctgcctcagcctcccaaagtgttgggattacaggcgttagccaccacgcccggccagaaagctttttcttaatgccagttatcataccctttgctttacagtttgcatatacctcacagctggctttgtgtcgtgtgcgcgtttaatatgctctcagtgtactcgtatgtaggaaaagctttaaaatagtccaataaatgtccattttgcaaatctcaggatcatatcactttcacgtatctagatgccctcaaaccgaaaattcagatttcagttaaggcctttaacttaacataggactttgattacagagatgtattttgctttgacagaagttaaggttaatgtcttaaatttccagagatgagaatacaatttctataacccagtaacccatttaacttcacttagattatcaattttcagccgtgaacaggccacttagtttctctgataagtggcctcttcatctgtaaaatagcagatctgtgtttcgtgtttctttttgtgtcaaagatcgaatcacttgtagaactgttcagtcagaatcaggatttcttcccctttccattgaagatggtttgtggtgttcgtagcataactggtcttgtctgctttagtcttaattttttcaagtgatagtctgttgtctttttgtgtgtgtcacttttttttttttttgagatggaattttgctcttattgcccaggctggagtgcaatggtgtgatcttggctcaccgtaacctccgctccccgggttcaagtgattctcctgcctcagcctcccgagtagctgggattacaggtgcacaccaccatgcccagctgatttttgtatttttagtagagacagggtttcaccatgttggttaggctggtctcgaactcctgacctcaggtgatccaccagcctcagcctcccaaagtgctggcattacaggcgtgagccaccgcacccggcagtatgtgtcacttctttgtctactcagagcatagtggttcatacctgtaatcgcagccctttgggatgccaaggtgggaggattgtttgaggccaggagttcaagaccagcctgggcaacatagagtgaccttgtctctacaaaaaaaaaaaaaggaaatacatatataacaagtattaaaaaggatcacacttaatttagttgtcatgtaaattgtggttaaatgccttttctagaaaagtgataaggtattttaaaaatttgatacaacatttagcctggtaatagaaagttcactaatgtgatacagtagtatctttctcaataattctctattctgatacctaggttcttctgtgtggcagttcgggatgatggatcaagctagatcagcattctctaacttggtaagatattttcagttgtatttctgtctgcaagaatgtgaaatatacaagcatgacttgaagcatgaaataataacccaaatctattatcaggtattcatttacatttgaattggtcttgaggcataactgatcccacagagttcagccttcaatagggttgattatagaaggtcttggaagaattctcagcgtggttctgggtgtggtagaggggcagctgagtagacaaggtgaactaaagaaagcgctgatcaaaatgtctccttagtgagagaggtaaaaagcaaagttggccgggcgtcgcggctcacgcctgtaatcacagcactttgggaggctgaagtaggtcaatcacctgtggtcaggagttcaagaccagcctgaccaacacggtgaaactccatctctactaaaaatacaaaaagaaaaaaaaaaaaaattagtggagtgtcatggcgcacgcttgtagtcccagctactcgggaggctgaggcaggagaatggcttgaacctgggaggtggaggttgcaatgagctgagatcgcgccactgcactccagcctgggtcacagagggagactccatctcaaaaaaaaaaaaaaaagcaaagactgaatgaggccaagtgtggtggctcagtcctgtaatcccagcactttgggaggtgaggcaggaggatcacttgaggagtttgagacttgcctgggcaacatagcaatcccatctctataaaaaaaaaaatgaaattttaagaaacattgagtagacagtatgagcgaaagctgaaagaacatacagaaaagacagccatccaggacatgatgaaaaggagcctaactcttgacacactatctagacctcaattctctcttttatttatttattttttgggatggagtctcagcgtgggctcttgttgcccatgttggagtgctcaccgcaacctccgcctcctgagctcaagtaattctcctgccttagcctcctgagtggctgagattacaggcgtgcaccaccatgcccagctggtgttttgtttttttttttaaatttttaatttttaaatttttaaatttttttattttagtagagacgggatttcaccgtgttggtcaagctggcctcaaactcctgacctcaaatgatccgtctgccttggccccccagagtgttgggattacaggcgtgagccaccgcgtccggcctattctctcttttctgtcttctctcttatgcttagtcagaatttctgcttatttataaccttgttttattcttgttccctggctcccgccagcatcatggtctgggttactgcatagtatcctaaagtgatttgtgcccctagtcccagctgctcaggagactgagacagcagaatcagtagagcccaggattttgaggctgcagtgagctgtgatgacaccactgcacttcatcctgggagagagagggagaccttgtctcaaaaaaaaaaaccaaaaaaccatttacagaaaaggaaagactgattgagaagaccagtgtgaactagcccttgactgggcccagggaagaatgttggtttgaaaggaaaacactgaggaatacatagcaagtcatagtaatggcccaataacaagcatatacctaagcaagcttttcctaaacattcctgtgcctgttcttcatcatgcctttttccccaaaacagtttggtggagaaccattgtcatatacccggttcagcctggctcggcaagtagacggcgataacagtcatgtggagatgaaacttggtgtagatgaagaagaaaatactgacaataacacaaaggccaatggcacaaaaccaaaaaggtgtggtggaaatatctgctatgggactattgccgtgatcatctttttcttgattggtaagaatgaccattccaaacttcaatattttccataaccaactctgagaagtctgttatttcagttcagcatatagttattttgtgcctttttgttttgttttgttttgtgacagtcttactctgttgcctaggctagaatgcagtggcaccatcttggctcactgcaacctctgcctaccaggtgtaagcgattctttgcgttagcctcctgagtagctgggactataggggctcaccaccacacccggctaattttttttttttttttttttttttttgagatggagtctctgtcgcccaggctggagtgcagtggcgtgatcttggctcatagcaacctctgcctcctgggttcaagcgattcttttgcctcagcctcctgaggagctgagactacaggtgtgcgccaccacacctggctagtttttgtatttttagtagagacggggtttcaccatgttgggcaggctggtctctaattcctgaccttgtgatccatccaccttggcctccgaaggtgctaggattacagacacgagccacttcacccgtccactttgtgcctttttaagtcccactaggaagacaatcatgagtagattctatacctgtcattgaatttagtctggttggagagagagacccatgaattctttcaatacgacgagcaagtgttttctttttatttatgtatttttttgtttgctaccactccaccaggaaacaaatgttacactaaaacatatacacaggatactggtggtgtagaagctcagtctgatgtttcaaggaggtcttttggaaaaagtacctatgttttgaataggtaactatttgcaataaagctagtatacagttcattaagtggcttaaagtatacaaaactgagatgcattatatactttaaaactacttagaatttgaaaaccagtattttcaaggcttacctgaaaagtattaacagggatagatcacaagtgaaattctgagttcagctctggaactttgtctctttagggtttatgattggctacttgggctattgtaaaggggtagaaccaaaaactgagtgtgagagactggcaggcaccgagtctccagcgagggaggagccagaagaggacttccctgcggcaccgcgcttatactgggacgacctgaagagaaagttgtcagagaaactggacaccacagacttcaccagcaccatcaagtgagcatgagctactttgcaagtatctagatgagtaattcaggaattatgataggctgcagggaaacaataatggtgacactgtgggaatggcttttcagagaagacaagacttgccatgtttagctaaagagggtgaggggcctgtaaagaactgaaactatactggtaggaaaaaaggtagaacttctagggagtctcctttttcttaaaaaattcataggcccttgatgttttcctgatctttgtagcttattgcttgctgtcattctttggctctgatttttcttcttaatctctttttttttttttttttttgttttttgaggagtcttgctctgtcgcccaggctggagtgcagtggcacgatctcagctcaccgcaagctctgcctcctgcctcagcctcccgagtagctgggactacaggcgaccatcaccacgcccggctaattttttgtgtttttagtagacacagggtttcacggtgttagccagggtggtctcgatctcctgacctcgtgatctgcccgccttggccttccaaagtggtgggattacaggtgtgaggcaccgcgcctggctcttcttaacctcttataatgttgtactaagctctcctttgttgacaagggcatcagtagcttttctcttttataggaaacaacacatgccagaagtagcctttttcatcttctagatcatgggtaatttaactgcctgacttaagtctctagtgcttcttagtttctgctgatactcacccattaacccataggccaataagtatccagagacagtgtctccctctggtggaggctggaatacagtggtacgatctcatctcactgcagcttcaacctcccaggctcaaaggatccctccaccatagcctcctgagtagctgggactataaacacgcagcaccacacccagctaatttgttttttaagagacggagtctcaccatgtcttccaggccggtctgtccttagatttttatttttatttatttagttatttattttgagatggagtcttcctgtgttgtccagactggagtgtagtggcacgatctcagctcactgcaacctctgtctcccaagttcaagtgattctcctacctcagtctcctgagtagctgagatcacagggttgtgccaccacactctgctaattttgtttttggtagaaacgggatttcaccatgttggccaggctggtctcgaacttctgacctcaggtgaccgaccctcctgcctcggcctcctaaagtgctggaattacaggtgtgagccaccacacctggccagatttttattttatgtttatttattttatttttaatgggctttctggcaaaagccagaaagcatgctagacagattttaagagctgtaacacttgtccatatagttttactatctttgcacatccatgcctctgtgcaaataataaatttatcttttccttttttcaagcttcctatagttagcgtggtactgtaattctttagtcttaagttatggcattttctacttcatctagttgatgcttttgtgcttatttactgtacaccagatattatggataaagtgagaatatagtccaccccacaaacatgtgagaactaatatgctgagtaaatagaaagagcgatgggagatcagaccaaggagcagctttgcttcagggtattcagaaatgcttcacaagtaggtgaaaattgaaactatgcaccctgtttagcacagtagtactatcttagattttataattgactttatagtagatctcctggaagctactcatttcccctcagcagatacattatgatgaggctcttgaaggggtcctttatagtgggtaaagaagctgtgaagttataaattaagatttggggcacagtttttttttcttagtttgtgttaatctagaagttttgggtcacagttcgtttatctaaactatgagggataatattttgctttcaaaacaatttgtttaatccttgagttaaatgtttattttaaattaaacttaagtttatttaaaagacattttctcctccaggctgctgaatgaaaatttatatgtccctcgtgaggctggatctcaaaaagatgaaaatcttgcattgtatattgaaaatcaatttcgtgaatttaaactcagcaaagtctggcgtgatcaacattttgttaagattcaggtcaaggacaggtatgttgaaagatggtaaacttatttttatacaagtagctattttcaggtgtgctaaatatagcaaagactttttgttactgttgctttttttgaaacagagtcttgctctgtcgcccaggctggagtgcagtgacacagtctctgctcactgcagcctctgccttctgggttcaactgattctcctgcctcagcctccaaagcagctaggattacaggtgtacacctccatgcccagctaattcttgtatttttagtagaggtggggtttcaccatattggccaggctggtctcgaacttttgacctcaggtgatctgcccgcctcggcctcccaaaagtgctgggattacaggcgtgagccaccacacgtggcccaaaggcttttaaaataaaaattaagcttaagatttagaggtaaatttcctgaagccaaataatgcaagacatactaaatgtaagctgttgtgttttttggaaggatgaccttaggcttattttaacttcatctttttaacagtgctcaaaactcggtgatcatagttgataagaatggtggacttgtttacctggtggagaatcctgggggttatgtggcatatagtaaggctgcaacagttactgtaagtaaggcaaaacagtgcatgagatgcttttccctcttgaatcattcaaaactcatcttttctattcttaggagttatacatttacttgtaaaatgtaaattatcgagagatattttggttttcaaccctctaatgacacagtcaacatgcaatgtcttctctctctaattactttccccatatcctgctttattttttctttatggtactgatagcacctgacattatctatacctttgtttccgttagaatgtgatccaaatgaagaaccatgggttagttctatttactgccatgtcacagagctttggagaatggctgaccatacatagtagtatttgctaaacaaatgcatatcctccctgtggggacagatctaaatatccatcttggatggggcctagtcttagcttgattcattaatgcttgatctttttttatttttgttttgagacagggtgtcactcttttgccttagctggaatgcagtggcgtgagcttggctgactgcaacctccaccaccacccaggctcaagtgaacctcccgagtagctgggacgtcctgctaatttttattttttattattattattattattattattattattatttgtggtagagacagggttttgccatgttgaccaggctggtcttgaattcaaactcctgggctcaagccattcatgcacctcggcctcccaaagtgctgggattacaggagtaagctgctgcacccagcccttgatctttttaaacttaggcagatacagtcaaattaacacagaaatagagaacagatagatggaataattttcagcttaaaaatcacatttgtggttgggcgtagtggctcatgcccataatgctagcactttgggagtccaaggtagacagatcacctgaggtcagagacaagcctggccaacatgttgaagtctactaaaaatacaaaaattagctaggcgtggtggtgggtgcctgtaatcccagctacttgggagactggggcaggagaatcccttgaacccaggaggcggaggttgcagtgagtggagattgcgccattgcactccagcaggagcaacaagagcgaaattcatctcaaaaaaaaaaaatcacatttgtgagtcgggcatctccagtggatacctttcgaggcaggtgcaggtctgtggtgattccttgcctttctggatacttgtgctttatcagtttgtctggctgcctgtaagccaggagtttagagatggtagattgttctgctaaagaacattgaagatttttcttcagcttccagctttctgtgttcaggtgcttggtgttagtgtctgtctatagctgttcatctggactcttcttagcttaggaacataatgacacatccaaagttggtgtatgcaagtcactttgttgtaacagatggtattttaattttgggacagatgtattgtcaggtctttcggttaaaacctctttctatgatgtcctcaaggcggagattgttccaggcctccagtcccatgaccagcctacacaggcctctttaatctaaatgccctttacatgaaaggcagtgtggaataaaagcatgaaagacataggaggctaaaacttttgattttattctaatacctctgacctaaaaattataaagttttttagaactcatgtcttttttaggccttggcctccttttatctcttacttgggttgcctgtcttaggtttgatctataaaactcttttgtctcaggattttagagctgttccaataccataatgctcattaaatctaatgtctttgttctagggtaaactggtccatgctaattttggtactaaaaaagactttgaggatttagactctcctgtgaatggatctatagtgattgtcagagcaggaaaaatcacctttgcagaaaaggtgagtgtgggttattttttatatatatatatataatattcaatacagtactttggtatcttactcttcaggtaagttatatttcttgttaatattcttacattctgaaaaccagcgatcttaaactctcataccagataatataattcattaaaagtgctaagcaaatcaaataagttccacttccctaatcagaaatgcttaagtgaaagctgtttgtctgtataactcagttttatgcatatacagaatacagttaaaagcatgttttataaaaaggaaaataaatagccaaacatacacaaggaactagattggaacctatcaaaggacagtggtgatttctgcatttttaaagaagtggcagggctcacacttgtaatcccaacacttggagaggctgaggtgagaggactgcttgagccctggaggctgtgagatgtgacttgtgccactccagcctgggtgacagtgggactcaaaaaagtggttgtcttagatgggtttttgttatttttcttttcttttctttttttatttgagacggagtctctgtcaccctggctggaatgcagtggcgtgatctcagctcactgcaacctctgcctcctgtgttcaagtgatgctcctgcctcagcctcctgagtagctgggattacaggcgtctgccaccaggcccggctaatgtttgcatatttagtagagaggggatttcaccaagttggcctggctggtcttgaactcctgacctcaggtgatctgcctgcctcggcctcccaaattgctgggattacaggcgtgagccaccactcctggccttcgttattctttgtttttttttttttttttttgagacggagttttgctcttttgttcaggctagagtgcagtggcttactgcaacctctgccttacagtttcaagcaattctcctgcctcagcctcccgaatggctgggattacaggcgcctgccactaagcccagcaaatttttgtatttttaaatttctttttttttttttttttgagacggagtcttgctctgtgccccaggctggagtgcagtggcgcgatctcagctcactgcaagctccgcctccccgggttcacgccattctcctgcctcagcctcccgagtagctgggactacaggcgcccgccacctcgcccggctaattttcttgtatttttagtagagacggggtttcaccgtgttagccaggatggtctccatctcctgacctcgtgatccgcccgtcccagcctcccaaagtgctgggattacaggcttgagccaccgcgcccggccaaatttttgtatttttagtagagacaggatttcaccatgttggccaggctggtttcaaactcctgacctcatgatctgcctgcctcagccttgcaaggtgttgggattacaggcgtgagccaccacgcccggcccgttattcttactttgcaaacaagtgagttaatttttcaggaaacaattaacacattactagataaacaatttgaaatatttggaagtattctgagtttagtcctctgtaaccatttggcctttagcataatgtccaagatgtattctcatttcatatgatcagattttcattttctgagctttatatgttttcttttaggttgcaaatgctgaaagcttaaatgcaattggtgtcttgatatatatggaccagactaaatttcctattgttaaggcagacctttcattctttggacatgtgagttatttcttgagtaaatcgccgttttgagttctttgaattgttcttggattcctatattagcagaaatagcactgtgtcttccttaaatgctctttttctgggagggcattagcagtaagcaagaagatagattacattgactttgaggctttattatttgttggtagaagtactttatcaatagtaccttgaactgagaatttccatgtgccatgaaaacaggagtcacattgtatagccactcagatttttgaggcttcaagttggtaaactaaggttgggctgcagccttataccaaatccgaatcttataccaactccgaatcttacagagaacttttgaggaagtatgtgatggagcgaattgctctttgtttttctaggctcatctgggaacaggtgacccttacacgcctggattcccttccttcaatcacactcagtttccaccatctcagtcgtcaggattgcctaatatacctgtccaaacgatctccagagctgctgcagaaaagctgtttgggtaagtcttgcagggtgaggttttatggttagggaagaacggtaatatgttgattaaaatgttaaacatgattataattttccacatttgggaatttggaagatagttagctgttaccttggtatagataaaaatgaatttttctctataaagagatcttaataatggacttacaaatgcaggagaataaggagacttacaaccccagtgaattccttgtgcaagattcctggcataacttctgctcaagtacttctgtgctgaggcacgatgcctgtggcaacccattcagttagtggagagaatctgttagaattcatattgggataaaatcccattccctgaaacatccatttgtctggatttttcttctaagcaacacgggatgattccagtttccttgtctgtagattgagaagcctcacttctcatgctggtttccagagaaaccatttatggtcatggcgctcctggatatcctccctgtagtgttagtgttcctctttaaaaacagcccagttccgttacagtacgtagcattaattttgatttggatgtggacatatttctcatttcctgttataggatagagatcgagtttcagacctttatgaaagcatttatctcctgtatgacataggctctctgatcctgtttctttaacataattcgatagtgaaaatatattctacttgatagtctcaaatgaagaacgtctgtatgtaaggactatgtgaaataccatgactattgaacatgctaagaggcctttagcgtaggggagggagtgtgtaacatactatggccattgataatgctaagaggcgtttagcataggaaggagtgtgtaacatactatgatcattgataatgctaagaggcctttagcataggtgatttttgttgactcattctacctaccacctacaagtcgtaaccaacctgtgaagccagtgacgcatcttacccttatgtagtaggggagtaataatgtttcaacctatatttgtgtaattaagcccccttaggaacagctattatttggggtaacacagaggaattagatgggggaagcataggattttttttttttttttttttggtgatagtcttactctgttgcccaggctggagtgcagtagtgtgaccctggctcactgcaacctccacctcctgggttcaaggaattctgccttagcctcccaaagtgctgggattataggcgtgagccactgcacccagctgagaaatattttttataactgagataagaatgtatactatccttattagtggtgacagttgggaaacataaaaatgtattactatccttttatatattaaaagaacttcattttgagtccatcttggtatgtattccaaatataaactacataactatatctggcggaaaggcatatatcagatgaggacagttggaagttttgtaaaatattgcttaaactaggaattcatggttttcagttggctgcctacagatcaaagtaagacacaaatggttcaccactacagagtaagtttgtttttgtttttgtttttgagacaggaattttgctctgttgcccagggtagggtgcaatggtgtgatctcggctcactgcagcctctgcctcccaggttcaagcgattctcctgcctcagcctcctgagtagctgggattacaggcacccgccaccatgcccagttaatttttgtatttttagtagtaacggggtttcaccatgttggtcaggctggtcttgaactcctgaccttgtgatccacctgcctcggcctcccaaagtgctgggattaaaggggtgaggcactgcgcctgcccgagagtaagttttgtttatatgtcctcttaatctagagcctcactagacaaaagtaaactttgggcaaggaacaataactcagaactttctggttctagaaatatggagggagactgtccctctgactggaaaacagactctacgtgtaagatggtaacctcggaaaacaagagtgtgaagctcacggtgagcaatgtgctgaaagagacaaaaattcttaacatctttggagttattaaagggttcgtagaaccaggtaaagaccgcccccacccctcttggttttgttgttgttgttgttgttgttgttgttttctttgctgttcttaaggatgtggcaagggaaggagggagtgtacgatgctggcttggcttggttttatgaagtgcttaatcttatctgtcctaaagtgaattgtttatgtgtcagatttttttgtttttgtttttttgagaaggagtttcactcttgttgcccaggctggagtgcggtggtgcgatctcggctcactgcaacctccacctcccaggttcaagtgattctcctgcctcagcctccccagtagctgggattacaggtgtgtaccaccatgcctggctaattttgtatttttagtagacagggtttctccatgttggtcaggctctatgaggtcagctcacgtgatctgcctgcctcggcctcccaaagtgctgggattacaggtgtgagccactgtgcccggcctatgtgtcagttttactgggaggtaataaggccctaggaaattcttgttaaaaattgaccattgtgactagaaaatctattctaagttattgactagaccagtgataagcaaatttcttaagggggcagataataaaccttttgcaggctatacagtctctgttttagctgttcaactctgtagaagcaagaaaataggcatagactgtacgtaatgaatgggtatgcaggctgtagtttgccagtccctggagttgagtttaaatgcaatcaaatagccaaacctactaagaaataagaaaatgactgctggccccgctacatactcaaaatcttatttgcagatctcccatattgctgctctttgtaggttacttaaaaaaaattattcctgttctttttttctttcacttaagtagtcagtaaatttaattagtagtgtaggaaaaaagtagctctactaataaagtaaaattaatattctcatgtgaatttttaattcccagagtttttagtcagatttgaagtaaggtgcttttattcttaatacatatactgcacttttacatttctactgatgtgctaattgtagaaaagtttagaagcttatttaaattcttcctcttttgtttttaaagatcactatgttgtggttggggcccagagagatgcgtggggccccggagctgcaaaatccagtgtggggacagctctcctgttgaaacttgcccagatgttctcagatatggtcttaaaaggtagagtacaaattttggttcctttgaatattggtgcactacagatggttctagatgttgtactgtgctttgctcgctttgcctgcattcctgtggttccctcatgccagactctagttcttaaatacaaggcagattgtcttttgttgtagctacctttttctttgaaacagctttccataaaatgtcttagctgtgctaaaaatcaccagtttctttgagacagtggattattgagccctagtgcttagtttgatgtatccagcatgataaggcggaccatagtccctaagtaatctatttgaaagcagtagcatacctctatactcatgtactgaggcctaacagctattgaaattttgttatgtttattcatttattttttgagacagagtttaactctgttgcccaggctggagtgcagtggcacgatctcagctcactgcaacctcctcctcctgactttaagccattctcctgcctcagcctcctgagtagctgggattacaggcgcccaccaccacgcctggctaatttttgtatttttagtagagacggggcttcaccatgttggccaggctggtctcctgacctcaagtgattcacccgcctcagcctcccaaactgctacgagtgagccaccgtgccccgcctgttttatttttgagcctttctgtcctgcttgccactctttcacactcctacccacccacacattcaaaatcatcatattcttgaatctttgggtcacagggcaaattgcaatgcttatctttatttaatacagagtacattaatggagaaaaaaaaatactgagggaagtgggtgggatggagggcagtgatatatgtatccccaaaaggcgctgtcacaagtgtagtttctctgcaaactcttctaataacttaaatttgtgaatttttattttattttagagttattttttaaaaatccaatgttttgatttacttctatgcaaattattctcaagatgtgcatcatcatgcttacactgttttcagtgatctctgggtccagaagttaaggaactgaaagaatgaaattgtaaaagggcgactactggcccctgctatgtactcgaaatcttatttgcagatctcctatattgctttttgtaggttgcttaaaaaaaaattattcctattcttttattctttcacctggagtctcaaagattttgttagtattttttttttttttttttggctcagaaaagaagattttggaatctgctatcttggagttagactttctgattcatctgaagtaggataccttccatccttgcccgtgtataaccgttcccaagataaagctaactttcttctctttcagatgggtttcagcccagcagaagcattatctttgccagttggagtgctggagactttggatcagttggtgccactgaatggctagaggtattctttatcatcatctattcccatattgggcacctgagcttgtgggttcaggctgtcctccagaaatgatgttcttataggtttgattttaccatttgtgcctttgcgcttagtctcaatagagtccagaattgaaaatgaatccctattgctactgtatgtgataaatgaacagatttgtacttattagtgttttctcttctagggatacctttcatccttgcatttaaaggctttcacttatattaatctggataaagcggtgcttggtaagtatccctttgtttagctgtttatgaattcaggtaaattactttttttttttttttgagatggagtttcattcttgtcgcccaggctggagtgcaatggcacaatcttggcccactgcaagccccgcctcccaggttcaagtgattctcctgcctcagcctcccgagtagctgggattacaggtgctcactaccacgcccagctaattttttgtatttttagtacaaaaaattgactatgcttcactatgttggccagtatggtctcgaactcctgacctcaggcaattcacctgccttggcctgggattacagacgtgagccaccatgcctggccgggtaaactactttgaagtggaaggaagcttttttttgagacagggtctcactcgattgctcaggctagagtgcagtggcgcaatcttggctcactgcagccttgacctcctgggctcaggtgatcctcccacttcagccacctggctaattttttttatagagatggggttttgccatgttgcacaggctggtctcaaactcctgagttcaggcattctacttcggctgcccaaaatgctgcggttacatgcgtgagccgttgccctcagcctgtatcttaaccttcctttaaatagtcggtcaagttacacaatgaacacatattgccttgtctagagcagtgggtggttctcaatgtggcccccagatcagcagcatcaggaactgttacaatgcaaactttcaggtccaccccaaacctttgagtcagaaatgggagtgttggtctaaaaactgggcttttttggctgggcatggtggcgcacgcctgtaatcccagcacttggggaggccaaggcaggcggatcacctgaggtcaggagttcgagaccagcctggccaacatggtgaaaccccatctctactaaaaatacaaaaattagctgggcgtggtggtgggcacctgtaatccctgctactcaggaggctgaggcaggggaatcacttaaacccgggaggcagaggttgcagtgagccgagatggtgcctttgcactccagcctgggtgacagagcgatactccatctcaaagaaacaaacaaaaaaactgggctttttttttgggcaacctttggggaataaaaacttactattttcttaaggacaaagtatcctgaagcaaagaaacccaaacaaataaacaaaaaactttaacaagcatgccaggtaattctgatgcactaaagttttaggaccataagtctggactattttgaggtgagaagaaactaaactatgccatatagaatggtacttagagagtaattcacatcctgttatgttgtggcatcactgatagaaatattggataatcatacttctagaagagtttgaatgttcactggcagcagaaaattgacagagtttgagtgttatttaaagtgcagattacattcaacaggaatggggtaaagaaagtgcagatgtagctgatgaactgagaatagtgaaatgtctacatggggggaaaaaggaaagagttacaattaagcctctaggttagttatttccctgttgtgtgtttgcagcagaatgtgctgagtatagcaagcatgttgtagctctaacctgggtgaaccagaaagttaaatgtgaaattgctaatgggggaggctgcacatgtgtcggggcagtggatttatgggacctctaggtacctttatcttaattttgctgctgaacctaaaactgctgatatttttaaaaagatcactaggattaaagtatgcaaactcaaggagtagtaagagcctcacttgagtcaagttatcatagttgctaaagaacttgataccaaaattacttttgtctacttgatgaataggatagctgttgcgtagggccactgatgtagattactgtcttgtcaagtacttgtagaagtagcagtgtgaaaattactggagtggagaaggggcaatgataaaataatttcttttcaggtaccagcaacttcaaggtttctgccagcccgttgttgtatacgctgattgagaaaacaatgcaagatgtgagtatatacctcattacaaaaatggatgacttaattttttgttgaatcgacctgagataaaaaacactgatatgtaaaaccatagtcagtaacaaaaactaggaattgagaataaattctatagcagcatcattaaagagatacttgcctgttgaaccatatgagatgaggaggtatatgaagggctgcaatctcaaaaaatatgtcgtctctttaggaatatataacaaaatgccatgaggcctgagctgtagtgcaggtgcccacaggggattgtctgtagagtcacaatgctaaggaaggctgaaatcaacttgaactatactttgagaaagccgtatgaaatattcattgaataaagaattaccatagttttgagtgagggagcagcatatgaaagaaaacatttgcttaatgggattagaggctgtgtattggagtgagtaaagttagatacaggtcagacagcagatattggctttgatcccaagggatactagggattataggatctcaagcaaggcaataatgaatttaccagttaggttggtggcataagatgcactagaaggaagaaaccagaaacaagataggcatattatggagcctaaagagggcttttacaattgtgggtatgccaccgtggttttttgggtgctttttttttttttttgagacggagtctccctctgttgcccaggctggggtgtagtggagcaatcctggctcaccgcagcctccgcctcctgggttcaagtgattgtcctgccacagcctcccgagtagctggaattacaggcatgcaccaccacacctggctaatgtttgtatttttagtggagacggggtttcaccatgttggccaggatggtctcgatctcttgaccatgtgatcatcccactcggcctcccaaagtgctgggattacaggcatgagccactgtgcccggctttttttttttttttttttaagagacagggtcttgctctgttgcccaggctggtctcaaacttctgggctcaagtggtctcccaccttggcctcccaaagtgttgggattgcaggtgtgaactaccccacctggcctaggcccatttttaaaatgttaattaagaaggaaacattttttcctaaccataactaaaggaactgaaaacatgagcctagttagtaataacttaaaattgagactgttttaactgtcataaataatttcttttcaagaaaatataatacaagttttctatttataaatttttatagagtaacatgttagtgactagcctgaataaataagttccaaaaggttagttttaatgataatttcttatcttacaggtgaaacatccggttactgggcgatctctatatcaggacagcaactgggccagcaaagtgtaagttgagaaaagtgaatgaacaaactaatagaaaagcagagattctgcctcctgtgtcaagtagaatccaaatctgtccttgcattgagcttacttacacctaaagatactcaactaaagaatttatttcggatgtgaggactagcatgatagaacagtcttctttagaaaactttctaaagacacatcctttcttcttgcagtgagaaactcactttagacaatgctgctttccctttccttgcgtattctggaatcccagcagtttctttctgtttttgtgaggtaagtctgaggaacccaaaaccaaaagcattccatcagttcatttaaatgacaaatggagagaggctctctaaaagaaatgatctttatttgggaatgggaaagtacatgggaatgtgctttattcagagaggtaaaggaaagcaagtttttaaaggacaaatgacaaggattacataattattttgaggtaattattcttgactaccaagatcagtcaaggtttacaggcagttgctcagcagattttctcacaagagaatttttttggtgcaaggtgtcagtggcctctgtgtaaggttgtattttcgtaaaaaggaaaacaaaaacccttagtccttgttatcagacatagaagggtgagacccttctcttcagggttgcatttttgttaacactagtgactccattttgcttttgcacgtatcttagttgttggggtttttttgtttgttttttgacaatgatgtcttgctgtgtcaccaaggctggggtacagtggcccaatcatggctcactgcagtctcaagccgtcttcccccttcagcctccaaaccgttcggattacaggcaagagctacttactacacctggccatggatcttcttgtgtcaactttgagaccaagtttactggagtgcttaaaatgtttttttttttttgttttttttgttttttttttttttttgagacggagtcttgctctgtcgcccaggctggagtgcagtggccggatctcagctcactgcaagctccgcctcccgggttcacgccattctcctgcctcagcctcctgagtagctgggactgcaggcgccgccacgtcgcccggctagtttttttttgtattttttagtagagacggggtttcaccgggttagccaggatggtctccatctcctgaccttgcgatccgcccatctcggcctcccaaagtgctgggattacaggcttgagccaccgcgcccggccttaaaatgtttcaagaagttatacacaagtgctggacgtggtagctcacgtctgtaatcctgtagcaggaccagccgcagacaaaaccccccagacaccgagttaaagaaggaagaactttattgggctggaagctttggcaagactcacgtctctaaaaactgagctccctgagtgagcaattgtgtcccttttaagggctcacaactctaagggggtcggcgtgagagggtcatggttgatcaggcagtgggaacgtgactgggggctgtatgtactggtaatttgaacagaacaggacagggattttcacaatgcttttccatacaatgtctggaatctatagataacataacccgtaggtcaggggtcaatctttaactatgcccagggtgcggcgctgggctgtctgcctctgccttttagtttctacttctttctttgaaggcagaaattgggcataagacaatatgaggggtggtctcctcccttaatcccagcactttgggaggccaaggcaggcagatcacgaggtcaggagtttgagactagcctgaccaaaatgttgaaaccccgtccctgctaaaaatacaaaaaattagtcagatgtggtggcgggcacctgtaagcccactactcaggaggctgaggcaggagaatggcttgaacctgggaggtggaggttgcagtgagctgagatggagccactgcactccagcttgggcgacagagtgagaccctgtctcaaaaaaaaggttatacacatgtaattattgcatgttccttcattatcagttttaatattagcttaattagcatttgagtttattgctaaaacttctttaagtatgagttttaataatgagtgtggtgggtcacacctgtaatcccagcatttgggaggccaaggtgggtggatcatttgaggtcaggagttgaagaccagcctggccaacgtggtgaaaccccatctctactaaaaatacaaaaaaattagctgggtgtggtggctcatgcctatgatcccagctactcaggaggctgaggtggaagaatcgcttgaacccaggcggcagaggttgcagtgagccgagatcgcgccattgcactccagcctgggcgacacagcaggactctgtctaacaacaacaaaaaaacgaggctgattttcttgagtggttgagcagtggcctgcctattggacagtccagctgaacagtattttcatcaggctgggtgcaatagctcacacctataattccagcacattgggtggctgaggtggccaggagtgagaccagcctgggtaacatgcctagtctatatctctacaaacatttttttaattaagctgcccagtggcatctgtagtcccagcttcttgggaggctgaggcagggggtgtcccttgagccaggagctcaagcctgcagagagccaggagtgcatgagcacacgctagcctgggtgacagagtgagacctcgtctcaaggtacatttcatgtgtgttctctttttccatgataaaggcccaaacttcccagaatgaaaaacgtacagccgtaagaatttggctagaaatctattcgaggcatatgatacgataggacagggattctgtagaatctggaagaaagtcatcactctaggagtgggttagattcagagaagtagcaagaatgtacttaaagcagcagataacgagatcacactggggtgggaatgtgttagaagcagcggggagctgtagtaacttacctcgatggggaagccagaatgtgaggcttttgctggtagacctcatgtgagtgccatagcctcgctttttcttgcaggacacagattatccttacttgggcaccaccatggacacctataaggaactggtggagaggattcctgagctgaacaaagtggcacgagcagcggcagaagtagctggtcagttcgtgattaaactgacccatgatactgaattgaacctggactatgagaggtacaacagccagctgcttttgtttttgagggatctgaaccagtacagagcagatgtaaaggtgagcactgattccaagtatgtttttactgctgaatgtcaagtagtttgaagtgtgatgtgttcctatgtgttcctggtgggtggaaggatgattgtagccaaagtacattttaaagtgaacggaggcacaattttacatagaatttgtaacttgtttgacagaagttgggaggctgtggatcagagacataggacagagctcagcagtatttcggaatctagagcaatgtcaggttttctatcactcatgtctcccaggcagccacagaatatgacggtctcacaaggagttgggctgtgtgcgtttcagacatgacgtggatggaaagacagcacagctaggaggattctgtctcgtattgatcctgtgcatctaaaattcaaatattccattaagtgaagctgataagcagggtgaggtggtgcacgcccgtagccccagctacttctgctgaggcaggagaattactggagcccagcctggtcgacatagcaaaatcccatctctaaataaattaataaaattaatattaagtggcttccagatagttttatggtactaggagttgattttttaacagatctcttaattgaagtaaatcactgataaccaaatctttttatgtttgtcttttctttttctttctttttttttttttttttgagagacaaagtctcactctcgtcccccaggcagaagtgcaatggtatgatcccggctcactgaaacctccgcctcccgggttcaagcaattcttctgcctcagctccccaagtagctgggattacaggcgtgtgccaccatgcccggatagtttttgtatttttagtagagctgaggttttaccctgttggacaggctggtttcaaactccttccctcaggtgatccacccgcctcagcctcccaaagtgctgggattacaggtgtgagccaccgcgcctggccccttatgtctttcttgaaactaattgtaactgttgaaaatggaacttaccagatggagataacgatcctgaagtacattgaaccacaatgttttcccctatagggaagttttccctcagaaggagaattgaactggaaacaatatagtacataggattgtataattttgtttaaattcctaatgagaatggttttcttacatgctgggctgaaatagagtgtatatcacagtctatagagcttggaaccctgtgcaaggtgcttttggagtcttgagcttatctgcgagttccttttatcagaatcttattaacacacgttaaattagaaaggcacgcaaaagagcgtccttagaaacaaaactcatagcgaagaatgtctgtttcaggaaatgggcctgagcttgcagtggctgtattctgctcgtggagactttttccgtgctacttccaggctaacaacagatttcaggaatgctgagaaaagggacaagtttgtcatgaagaagctcaatgatcgtgtcatgagagtaagtgaacttttgggaaaggaggaactaaagtatgtgtaaaattttagtggataaatcttccacttccgcagagtggacaaactctaggagtctagaattccgttaagaagggaagaaggagcattaatggcttagctgtcattttctatttctgctaattcagaccttggccaaacctagtcttcttggaagagacttgctgtaaaccttccgggtatactccagtggggaaaagaatctgaacacatttaaagttttccttcataaaatgaatccgtttcctttaaactttttatttatttatttatttttgagacggagtttcactgttgttgtccaagctggagtgcagtggcgtaatctcggctcactgcaccctctgcctcctgggttcaagtgattctcctgcctcagcctcccgagtagctgggattacaggtgcccgccactacgcccggctcattttttgtatttttagtggaaacggagtttcaccatgttagccaggccagtcttttttttttttttttttttttttttttgagacggagtcttgctctgttgcccaggctggagtgcagtggccagatctcagctcactgcaagctccgcctcccgggttcaggccattctcgtgcctcagcctcccgagtagctgggactacaggcgcccgccacctcgcccggctagatttttgtagtttttagtagagacggggtttcaccgtgttagccaggatggtcttgatctcctgacctcgtgatccgcccgtctcggcctcccaaagtgctgggattacaggcttgagccaccgcgcccggcccccaggccagtcttgaactcccaacctcaggtgatccaccggcctctgcctccccaagtgctggtattacaggcgtgagccgctgtgcccggcctcctttagaattttaaccttagaagattagcattagcctggttcccagcattctgttttcctcactctgctacagaaagtctgatcagctgctggactcagtggctcacgcctgtcatcccagcactgtgggaggccaagacaagcagatcacctgaggtccggagtttaagaccagcctgaccaacatggagaaaccccgtccctactaaaaatacaaaaatcagtcgggtgtggtggcggcgcctgtaatcccagctactcaggaggctgaggcaggagaattgcttgaagtcaggaggtagaggtggcggtgagccgagattgtgctattgcactccagcctgggcgacagagaaactctgtctcaaaaaaaaaataaaagagcgatcagcattcctaatttgggaaactttatgttggaagtgaacagttgttttgctacagaagtcacaggacagtgtaaattgcccgacgttttgttttataggtcgagtattacttcctctcaccctatgtgtctccaaaagagtctcctttccggcacgtcttctggggctccggctcccacacgctgtccgctttactggagagcttgaaactgcgtagacagaataacagtgcttttaatgaaacgctgttcagaaaccagctggctctcgcgacttggactattcagggagctgcaaatgccctttctggtgacgtttgggacattgacaatgagttttaaacgtgatacccgtagcttacgtcagaacagcaggatagtctagtttctagactcgtgctgattgtgctacgttttcagtagggcttcaaaacctgatgtgaaaattccatcccatcatcttggtactactagatgtctttaggcagcagcttttaatccagggtagacaacctgtccttcacgttaaagcgaataaccacttaaaaaatgtccctgatggaatattcccctctctagagtcgtaagtgctgtgtaatggtaactgcctctttcctggtggtggtaatgaaaatgtcagaaaccagttttgtgagcgtttgctgtgaactctaagggctggtctctgctgaaggctgtaaggggtcgcttacttcgagtgatcctccaacttcatttgatgccggataggagacaccaggtcgacagaccttctccaaatgagatctgagcctttccataaggaacgtaactggtttcctcattcctgaaagaaacagttaactttccgaagagatgggcttgttttcttgccagtggggtctgaaatggaggtccttctgctcgatcaaatgaggctcaactgttgattgcaggaataaggccttaatatgttcacctcaatgtcatttatgaaaagaggggaccagaagccaaagacttagcatattttcttttcctctgtcccttccccataagcctccatttagttctttgttatttttgtttcttccaaagcacattgaaagagaaccagtttcaggtgtttagttgcagactctgtttgtcagacttcaaagaataatacactgccaaattttggccaaagtgttaatcttaggggagagctttctgtccttttggcactgagatatttattgtttatttatcagtgacagagttcactataaatgatgtttttttttatagaatataattatcggaagcagtgccttccataattatgacagttatactgtcggtttttttaaataaaagcagcatctgctaataaaactcaacagatactggaagttttgcatttatggtcaacacttaggggttttggaaaacagccgcaagccaaatgtaattgaataaagttgaagctaagatttagagatgaattaaatttaattaggggttgctaagaagtgagcactgaccagataagaatgctagttttcctaaatgcaatgaattgtgaccaagttataaataaatgtcacttaaaggctgtggaagtactcctgcacaattttatagctcagtttatccaaggtataactctaattcccattttgcaaaatttccagtacctttgtcacaatcctaacacattatcgggagcagtgtcttccataatgtataaagaacaaggtagtttttacctaccacagggtctgtatcggagacagtggtctccatatgttacactaaagggtgtaagtaattatcgggaacagtgtttcccataattttcttcatgcaatgacatcttcaaagcttgaagatcgttagtatctaacatgtattcccaactcctataattccctatcttttagttttagttgcagaaacattttgtggtcataaagcatttggtgggtaaatgcaaccactgtaaaatgaaattactacaaaatttgaaatttaacgtgggtttttgttatctttgtggtttctccaggtcctctacttaacaggatagtagcatacatttgtaatgtttgctattgacaagtcattttaactttatcaccttatttgcatgttacctcctataaacttagtgcggacaagttttaattcagaattggccttttgacttaaagcagggggactttgtataggaggtttggggggtgtggggagggagagtccccagaagatctttgacacgtctgcctacccattcgtggttataaattaaatgtaggtatgaataagtttgaagctacatgagtgaaccatcgttataaacgtgatcagctgtttgtcatagggcagtttgaaactgcctcctaggaagaggctcataggggtctcttgaggttcttagtgtaactcacctagatttacagcctcactggaatcgtttcactactcacagtctctttcatcttcagttttatctttaatctcctcttttatcttggactgacatttagtgtagctatgtgaaaaggtcatagccgagattcctggtttgggtgttacgcttacatacttaaatgaaagtatgtgacatactcatagtgtaacacaacatgaataaaaggcatacattttgcagcagtcagtctcttcagaaaaccctcttctatagtagggttgagttacttcctatcaagccagtgtgtggtaacaggctcaatattcctgaatgaaataccagactagtgacaagctcctggtcttcagatgtcttctcgttaaggagatgggccttttggaggtaaaggatacaattagtgagttctgtcatgattcgctattctagaacttgcatgacctttactgtgttagctctttgaatgttgttgaaattttagactttctttgtaaacaaatgatatgtccttatcattgtataaaagctgttacgtgcaacaatgtggagattccttatctgatttaataaaatacttaaacactga

SEQ ID NO: 400 - DNA, 23899 bp, synthetic construct
  misc_feature 1..23899: note = Synthetic
  source 1..23899: mol_type = other DNA
gtgcggaaggaagtgacgtagatccagagggccggccggggggtggggccgagctataagctttgggtgggaggcagcgctgccttcagaaggcgtgcggagcgcgggctgctgcattgcggactgtagaggcgcttcctagtgagtgactcccttgtcagcggcacggcccatcgtggtcctcgcgtggcgggcggaccagagcgagacgccagggcctgggtggtgcgggcggggaggcggaggggtgtcgcggagtccggggctgaggagcgcgggttgcaggtgcagcgcggtgggtgtggggagccgctgtaccctgcgcccctcgggtcctccgggccttcgcaggccagtgctaggccgcgggttcgagagtcaccacgctgaggcgcaggcttgttccgccgggagcacgtggtggcggctggaggaagtcgccccagggaacggctgtcggggtacgtgggtgaccttggggcccctcgcaggagggcgtcacagctgaaaaggacaaagctgttttctattcggttactagtgtcacggacatttagaggggcggggggagcttccaataactgcacgttggaacttcggcaccacctggtcggtttttttgccagtctctccctcttggcccagcgtgtggaatctcatttttctagggcagaataggtctgaacgctgcaggtaatactaagaacgtctctagcatctcctaagatgggagaacgtagaaatacgacctctttgtacgagctcttttagaactagctgtagagaaccagcgtgcaccctggtgttggacagctctctaaaatggtgtttgagggtaagaaaactgcatttgcaaatttttcagttagcacactttgtcccgagcgtaaaatgaaatgatctccttatacttaggcagaagactggactggattgctgttcagtttctgtgctatttttttaaaataggatttaagtgggaaatagttgtgttacagaaattctcggctattctgtgctatttttttttaaataggatttaagtgggaaatagttgtgttacagaaattctcggctacctgatacttttattctaagattagatgagttggctctgagctgtgaaatatgacctctttgacaaagacatttaagctgattcaggatgttatctacaaagaaaacgggatttagcttgtgtgggtccacttgcatttattttctgttaaggattataataaactgctttatacaggaatccaatatcagctgttttttatatagagagcataatactttttactttgagagaggatgttgtcaaggaatggtggctgtgaacctggcctgtgttgactggttagatctgtctgcctaaccccaccctaaggctaagtagttatatgcttgtggcaatgtgcttatttataatagggcaagattatgggctaaatttgggttagacaacaatgaaagttaattaaacgaccctcaggccttgggtctactatgtgtaagtgatttccttctctcccagatgagtgctatacaaaataaacttcagtgacctcaagtggttttgaccttttggttgctattcagaaaactatggaaatgaaaacctgctacctatttcctattgccttttcaatttcccaaagaaggtctcccctatgaatccatgggtagccttgaactcagatccacctgcttctgtttggagagtgataagattaaaggcaagtgccaccacacccagcaaagtaggctcttaaaactaaaacctttgcagtcgggcatggtgccacacacctttggtcccagcactggggggtaaggcagaggcaggtggatcactgagtttgaggtcagctagtgctgaagagtaagagcctgtctttaaaacatctcaacagctgggcagtcgtggtccattcctttaatcccagcacttgggaggcagaggcaagtggatttttgagttcgaggccagcctggtctacagagtgagttccaggacagccagggatacacagagaaaccctgtctcaaaaaaccaaaatataaataaataaataaagattgggagagaagtcaaggatctcataggtggtcagggagctacaactgcagtagtaaagaagtaggacttaaaagaacagggccggcactaattttgaggatctagatcgggccctcaattaaggaacttccttttgtgtgaactcagaatttgaaatgaaatgtgcttgtcagaaccattgcatggcttattttttaatgaaaagtctggctagtatctgcttatcttccagcttccagctcaaagttaaggtcatagatcaaaagaactatgtctttatcttagttgtatcttaatttttattagaattgaatggttttcctaatgtttggtaacatcaaaggtgtgtaagtaaaagtgagaaatcaagattaactttctcttggcaaagattgttgacattggtgacatcttggaccaaatgagaattgttttacttttaaatgtcccatcaacagctctcagttaggctgttctatctggtttgtcttgccatgcttgcagagtatagatttgacaatttgaaaattcaaaaagctatataaataggtatgttgctatatgtaagattttaaatgagtcagttaagacttaaagaataactgggtttattttatcttgtcaggttatcactgtgtagaccaggttgaccttgaaaacaaattctctgcttcccaagtgctgggattaaaggcgtgtgtcactagctctgacactggctactttggaactactatggtgttcacaaatgcagagttgagtgttgggattaaatggaaatttcatgtctttttttttaactttcccttctacacagggcttctctgtgtagtcctggctgtccttgtagctctagactaggctgaattcaaactcagatccacccacctaagtgctgagattaaaggcatgtgccaccactgcccagttctgaattgttggggttttttttttgttgttattcttaattttagttcgatgaattaaaatcgaaataacttgtttcttagaaaaataaggtgtaattgggttataaagccaaatttagacattaataccaacagcctgtttaggctcaaaattgttcaatcattttattagtattattattaatcatatcaacttgagacctgtttgggaaagcagaatattttagggatagctatttcagacaagcattaatgtgttagctgtttttttccccctagaatatgattaaaattggctcagggtggggccttctagttctggctctagcgattgggtctgtttctggtgaggtggtagtgataaactgtaacagaagggacaagagattgggcttctgagaacatgtatgatctggtatgtgactttaatcattaaagcatggggattcaaaaatactaatgaataggccttagaactagtcctgagtgttttgtaaaataacagtcttaattctcctagtttctggatttttttctttgtctttggatactaagtttaagcatttatttggacagagtggtgcccactagctgttctattctagtacttgggaggcaagaggcagaacgaacatggccagcttggacaacttaagaaaactgaaaggcttgccatcctagtttttcttttgattaaacacacttatattctaactagttttctctatcctttgggttttgttttgttttttatttgttttgtagctctagctggctggcttcggaattgcctgcctcccaagtgctaggattaaaggcatcacagtcactacccaattgatatcatgattcttaattcaacttctaagaacaaattatcacactctgaatctaacatggaatagcattatccatgttcagatatctttgtctcaaggctcaggtttatcctttgtagctttctttttgctatcccacctctattcagcatccagtcaaggatcactgagttggttatcagtaaattaaacattttaattaatgtctaggagacaggttatggtatagttctcagtgctgggaagttgacatggtaggatctcagttcatggccagccagaactttctggtgagatcctggttcaagcactacagagcttttctagaaaagtaactatatttaggagtaagtttgatataatgacaatcccatcgtaagccttcagtaacctgatgcattggtctctgttttaatatcaggtactcccttgtagcagctgagaatgatggatcaagccagatcagcattctctaacttggtaaggtactttcatctatctgaaaaaatgttcagtaaaaaacaaaacaaaaacatgacttcacccagtgagtacaagatgatacccccaattttttttttttttattatatgtatgtacactgtagctgtcttcagacacaccagaagagggcgtcagatctcatcagatggttgtgagccaccatgtggttgctgggacttgaacactggacctttggaaaagcagttgggtactcttacccactgagctatcacaccagccccaataccccaaattttgaccagccttttttttttttttttttttttttttaaatctgaactaatggtattaaggtgaaacagattgcacaaaagaggtactaggtttttctttgaggcaaggtctttctatattgcctcaggttgaccttaaactccaacttcctttttttccccaagtgctggagattgtagacagatatatacaacaccccaaaacaaatatgtttagtttcgattaagattcattatgtggggctagagggatgacttagaggttaagaacactgcctgctcttccagaggtcctgagttcaattcccagcaaccacgtggtggctcacaaccatctgtaatgggatccgatgccctctttctggtgtgtttgaagacagctacagtgtcctcatacataaaaaaaataaacaaacagatcttttaaaaaaaaaggtacagtgtacttatacattatataaatgaatgattctttaaaaaattaattatgggaaatacttatgaagaatagggtagctttggctgttttggaaacgttatataacaaggtagaactaaaatgtatgccagtaatcccagaggaatcattagccagtcagggctagtctgagcaatgtggcaagataaacccatctctttaaaaaaaaaaaaaagtattataaatagaaatgttataggaaacaggaaatagaaaccctcgaaaggctgaatgaaagagtattagtgggctggagagatggttcagcggttaagagcactatctcctgagttcagttcccagtgaccacatggtggctcacagccatctgtaatgagatctgacgccctcttctggggtgtctgaagacagcgacagtgtactcacataaaataaatacataaagactgttagttagccttcatctaccatttacagaactgggcacagaaaggagttcatcagttataaagggtaactttccatatgaatgtttgtcatattattatgcatatagtataatgaccaaactactgtaatgtcttaatatttgtatctcttttctcttttttaaaaatatcagtttggtggggaaccattgtcatacacccggtttagccttgctcggcaagtagatggagataacagtcatgtggagatgaaactggctgcagatgaagaagaaaatgccgacaataacatgaaggctagtgtcagaaaacccaagaggtttaatggaagactctgctttgcagctattgcactagtcattttcttcttgattggtaagaatgagtggccattcagaaggatttcttatgactaactagttcttagactagctagttcttagactagctagttcttgtttcttttggatgaggagatgctttgtactttaaatggcactggggctccctacctgccggcagattaggtcctgcaagatgggaaacgtttacattatggatgttttattagagatatgcaggacatttggaatagtactaagaaaggcttccagtaagacaaggtgtgcacccatgtcttaaacaggtcactgtaaaatatgacttagttgtggtaatttaaattccattaaactcaggttcataattttctattagattctcatagtttaattaaaagttttcagggataagttaaaaatgagttctgtgagtttagctctaaaacttcctgtttttaggattcatgagtggctacctgggctattgtaagcgtgtagaacaaaaagaggagtgtgtgaaactggctgaaacggaggagacagacaagtcagaaaccatggaaacagaggatgttcctacatcatctcgcttatattgggcagacctcaaaacactgttgtcagagaagttgaactccatagagtttgctgacaccatcaagtaagctcaacttcccaagttcagtcctgatggaaacgtttttgttgggggggtagggagacttgaaaggctttcagagggtcctcctgacaatgtggaactatgctgacaggaaattaggacttacctggagagcctcatagcctcctttttcttcagaatcgttttatcagttgtagtttagtgtgggatgtcagattttcttctgttctaatattccttttaaaaattttttaaaattaaaattactttttatgtattatgagtatagcctgcatatatgaatgaatgtgcattactaattacacttatctcctagtgcctacataagccttatagatggttgtgagccagcatgtgggtgctggaatccaaaatggttcttgcaagaccaaatatgttacatcccagagccattacaatcctctagctctctttaaagattttgatttgtatttgtgtgtgccactgcagtacctcttggattcaccaatagtgtttacagtgtttgatcttgcttctccagatctcctagatggtgttgtttatcattcccctaaaactcctatacagatatataaggatggggctttttttttttaatttttaaaaaagatttgtttattattatatgtaagtacactgtagctgtcttcagacactccagaagagggcatcagatctcattacagatggttgtgagctaccatgtggtcactgggatttgaactcaggaccttcagaagagcagtcagtgctcttaactgataagttaataataagttaactgataaggtaataaaggtcccctatgaaaagggttcagacccaaagagtcagagatccacaggttgagaacctcctgccctaaatcttgttgctctccttattcaagaccactcctgttgcagttgctcttaagcatgagtatgctcccttctgaaagtctccatagcagccatctctccagccccagagtgaggcttttaaaggaatcttcatgataaatagaatttttaaaaaagtaactgaagttacttaaggtgttaaggtacattttattccctcagtaactggttaatctagcagttttgagtcatacttcatttatcttgactttgaagagtaagatattaaaacaatttgcttgatccttgaagtaagtatttaaatagacattttaatgcagactttttttagttgactggtggtgttgcacgtggtcaatccaagtactcatgggaggcagaggcaggaggatctctctctagaccagcctggtctatagagcaagttccaggacagccagggctacacagaaaccttgtttcaaacaagacttttatccttccaggcagctgagccagaatacatacactcctcgtgaggctggatctcaaaaagatgaaagtcttgcctattatattgaaaatcagttccatgaatttaaattcagcaaagtctggcgagatgaacactatgtgaagattcaagtgaaaagcaggtatgttgtaatagtagtagctcattttatagaggtaactgctttgagatggtcagtagatgaaacttgcaaaatgaaaatcaaggtaaaaatttagagattacttttcctaagctaatcaatgcaagtcaaatgctatgtatactaacttggatttttcttttaaggacggctttaactttattttttatcttttagcattggtcaaaacatggtgaccatagtgcagtcaaatggtaacttagacccagtggagtctcccgagggttatgtggcattcagtaaacctacagaagtttctgtaagtaaaaatagtgaaattgactttccagtgtctcacgaaggaaattagatatcccggtataaattactggttatgagattattgttcttggacctttattacctttggatgaattttaaggtcccattttgttttgtaagaccctaaatcagttggttctcaatctcccctttaatatagtttgtcactgtggtgatctctaaccatgaaattacctttgttgctatttaatgtcttgctgtaaattctgctttccaagggtcccctatgaaaagggttcagacccaaagagtcagagatccacaggttgagaacctcctgccctaaatcttgttgctctccttattcaagaccactcctgttgcagttgctcttaagcatgagtatgctcccatctgaaagtctccttattagtcacagatcaagagaatgccctacagccatgccaacaagggacattccctcaatttaagtttctttctaatgactctggattctgtcaagttgacaaacaacacagcacctgagatacataggttgttttttgacctctgtataagccacatgtacacacaatcacagtttctgtgttttcagatgctttagattcagatgtggaaatatggaataagtgcttacatgcctgatctgtttgtttatcctttccctagatatagttgaggcaatgtaaaagcagaatgagatgtagaattcatgaagccagaactcttagattttttttttttccaggaacattgcttactttagaattgtcaaaagtttggaattttattttgcccgcccctctccttttttctctagctccctctgtggagcaggctggcctcaaactcagggggatccacatgcctttgcctcccaagtactaagattagaggactgccactagcactgccaggcttcagttgtttttctcatgagtcgtcttgtctttcagattctatagcagttttgatacagtgatcttcattaaacctaatgtctttaattttagggtaaactggtccatgctaattttggcactaaaaaggactttgaagaactaagttattctgtgaatggatctttagtgattgttagagcaggggaaattacttttgcagaaaaggtgagtatgaattattaaaaattgtcttatttttgtagattatattgtaactatttcccttctttcagacgtacctgaatgctttcccttacttatttataattttatttttgttgtgtgtatgcctaaatatataaatgtaagcttagtcagtatgttgtatgtttcagggctgaccgtttggtatttagtaattagttggtgtgctctttcctgggaagatttctctgtagtagtgttattttcattttgtatgaactgattttcatatcattcatttttgtggtcttttttattttaggttgcaaatgcccaaagctttaatgcaattggtgtcctcatatacatggacaagaataaattccccgttgttgaggcagaccttgcactctttggacatgtgagttcttatttctgagtcaatgatttctctaggtgttcttacattctttcaggagacgcttagcaggaagtaagaaggcagttgctgagaatgcttaattaatagtacttcaaattgaaaattttttggatgcactaattctatattttaagcttcattttatagaaatagttagactttatttaactctttagatttatttctaagtaatttgggttatagcctcacaccctatctaagtcttataggcaacttcctgagtaagtgttagaactaattattaatacatctctgtttactaggctcatctaggaactggtgatccatacacacctggctttccttctttcaatcatactcagtttccgccatctcagtcatcagggttgcctaatatacctgtgcaaacaatctcaagagctgctgcagaaaagctatttgggtaagttacatggtgaggttgtgattatgcaagggaaaaaaaacccctaagtttatttaataaaagtggcagttggctataatgttcacatttggaaatttgggagaagttaattgctaacttgtatagtttttttttttaatgagattttttttctctataaataaagtgatcttgacaaggggtttgtaaccttgtttactcagtgcattcctactgtggtgcttttgctttgaatactttctatgttgaggtgaaacactcgattccttttgacaagccattcagttactgtaagaaatatattgtaattcttgatgaactgatatctaatggtgtaataactattagttgcaaattttgggccagacagtggtggtgcacgcctttaatcccagcacttaggaggcagaggcaggcgaggcagaggcaggaggatttctgagttcaaggccagcgggatctacacagtgagtgccagggctatatacagagaaacctgcaaatttttatttttggcagcacaaaattattctagtgacagtttctagttgctttatggtaataattattctggttgccctttgtcgtttataagtgcctgaacatgcttttagtcacagcccgagcaagtggataactgagctcaaggccagccaaagagcaagttcctagccacccagggctgtgagatcctttctcaaagtgtgtaattaagctttctttctccctcattataagagtatctaatttagaactttaatcccagcacttggaaggcaaaggaagctggatctcttgaagccagcctggtctacagagggagctcggggcaactattgctacacacacacacacacacacacacaccacccatgtcttgaaaaacaaaaaattatctaatttaaacccatttttaagcacttgtttattatgtaacaggagttactctaagccctctctctgctcttgtttcttcaatttagttggaaaactagaatagtcacaaataaagaacatctctatgtgagaattttgtgaagcactgaatgactcttacctgagaaatatcaggcagtagtaggtgattcttactaactcgtgctacctagcacttgtctctggatttataaaccagaggaaaaaatattagctcaaaatgctaatacctatttttttctatttctagaaaaatggaaggaagctgtcctgctagatggaacatagattcttcatgtaagctggaactttcacagaatcaaaatgtgaagctcattgtgaaaaacgtactgaaagaaagaagaatacttaacatctttggagttattaaaggttatgaggaaccaggtaaagacctgctttgtactttttcactttactgttttgcttactgtagataggtctagtgcaggaaggagaaggatgctagcttggcatgaactgctatatcttgtttgtcctaatgtgaactttgtaatatatgtgtatataacacataatatggccatgtaagtgtatggagaggccagagttaagtattaaatatctttctgtaatcatttaaaattttacatatgaaggtcagtgaacagattgaaggagttttgtccaggtgggacttggatctaaattttttacaatgcctggcagcaaacacctttttaatcaactgagctgtctccccaaataaagtgaatgtgatatcagcttgtggataatttttttttgttgctttgataagtggttttcttacaggatcacataccagttctgtccatagcattaaacaaacataactgtcatgcagtagattaatgtgcagggcacatccaacagtcacatttattaataggacaaaaagttggaccttatatgtagcacacctataattccagtgctaggaagatccgggtaggagatccttagttcggtgctacttagtgagggtttgtttcaaaaaacaaaagctatgatggtgtgttgccttttttcttttagaccgttatgttgtagtaggagcccagagagacgctttgggtgctggtgttgcggcgaagtccagtgtgggaacaggtcttctgttgaaacttgcccaagtattctcagatatgatttcaaaaggtacaatagaaaaaaaaattggggcactccatgttattctgtcacttatattctgtcttgttcagttttacttgtgatcttcttaaattctgatcagacaagatcagggacatttggggtggtatggccagacagtcctggctgtcctggaactcaatcagatctgtctgcctctgcttcccaagtactgggattaaaggtatgagccaccactgcctgttgtgttacactctcttatggtagattctttctttttttttttctttttttttttccagagctgaggactgaacccagggccttgctaggcaagcgctctatcactgagctaaatccccaaccccggtagattcttttaatacagaactatctatcttcattaactcatgactttgacatgaagtttcttcattgaactagcaatccttattctttgaaaaactgtatttattagtattaagctaaaccatattcttagtttaacatgaatagaaatatattattccaagacctaaaaacccttataattctacttctaagacttttttcctgatacttggctcacacaaagtaaaccagcccaggatcttatattcttttaattgaggtctaaagtgttgcttttatacaaggtatgttgtagaaaaatataaaatcgggctggcaagatggctcggcactgactgctcttccaaaggtcctgagttcaaatcccagcaactacacgttggcttgtaaccacccataatgagatctgatgccctcttctggcacatctgaagacagctagagtgtacttctgtacaataataaataaatcttttttaaaaaaaagaaaaaaatataaaatcagggcagttggtagtcatgtactgcttaaaggaattgtcacaaagtactttttttttttttttttttttaagatttatttatttattatatgtaagtacattgtagctgtcttcagacacaccagaagagggagtcagatctcgttacggatggttgtgagccaccatgtggttgctgggatttgaactctggaccttcggaagagcagtcgggtgctctaacccactgagccatctcaccagccccacaaagtacttcttaaaacttatgtataagctgggcaatggtggcacatgcctttaatcccagcacttgggaggcagaggcaggtggatttctgagttccaggacagcctggtctacagagtgagttccaggacagccagagctacacagaaactctgtctcaaaacaaaaacaaaaaaccccacaaacctaggtacagcctagcatagtagcatttatagtcccagctacttgggagcctaaagcagggtggcagaggggaagggggcattgcttgtgaatttaaagcaaacctggacaacatagattctgtctcagaataaggtaaatagtccatattttaaatgatagacttctaagcagattgctctcacagaaggtatacatcataacagtgcaactgtccattgattaaggaactgaaataaagttgtgagggcgtaaccacaataaggtgccctgccatgtactcagaacattacatacacgtgctgtcctacaaagattatcttcaaaaaattgttgctgctccttcagtagtctcacctggggcttcaaaaggaaaggtgtttgaattcaattaattcaggagcttctaagcgtcttagttacctgcctgcctgtaacctctctcaagatgaagcaatgtcttgtcttccagatggatttagacccagcagaagtataatctttgccagctggactgcaggcgactttggagctgttggtgccactgagtggttggaggtatgcatttcatagtctatatctagggtgtgttagtctgtatattccaagttaagctgtcctacatctctgtgccatttttgcctttgtgtagtatgtatcagtggaatctagatttcaaagtggatccctccaacaaacactaggtttctaagtcattggttcgtgcttattaacaatgtatactttactagatgttagtatattaacaatgtgtcctctcttctagggatacctttcatctttgcatttaaaagctttcacttatattaatttggataaagttgtccttggtaagcatctgttttttgttttattttgttttttaatttgggtcaactgtatagggaacagagacttttaaagcagcacttgttatgttttatagtgtacattggccataactgaatctaatccatcaaactatagagtttatttctagttaatatcaatcttgatattgttgtgaggctacctatcacagatcgtttttctcttgtgtagctttgtagtgtcctggaacttgctttgtagcccaggctacaaagattcattcaccttctgcctccaaagtgctggaattaaaggcatgcaccactacacctgcgtttccttcggttctttggtttaattttttagaaggactgtgggttccttttttgtttggtttggtttggtttggtttatgagtgttatttactagaaaaacctatttctagttgtggtttggcttagccctagtatacacctttaatcgaagagttttttgctttaatattgtaaatatgactaaatgaagtcagctgtaggtcaaaaggtagagcaaggaaccagttgacgggtaaacctagggaacaaaacaaaacaagaagtcagaactaagagaggtgtacaggtaataaagggaggggcattcagtttgaggggtttttgaggtagtgtgatactctttgactttccttggctattaaggaagatcaggtgggtgttttctctgcctctctgaggtagcacactttcaccccaacatctggcttccaagtctttggtaaaattgaactattgagattttgttaaaagcaaccctcctgcttccctcctgcttctgcctcctgagtgctaggattggtatctgtcatgtcttcgtcgggtagttttaattatagaattgtttatgaatactgttgtctaaagagggaataatgctaataataattattttataggtactagtaacttcaaagtttctgccagccccttattatatacacttatgggaaagataatgcaagatgtgagtatacctagttacaaaattgtatgcctttttttttttttgtcaaagataaaacactcaacagtaaccagtaataggaattgaattgaaagtaaattctatagtcatgttcttgacttattgatccttagtctactaactaatatatgaaagattctcagaatacatcattaggattgttgccctgggacctgaacttacagggagattgtaagctgcaggaaggtttagaaggacttgaataacaccagaggaaatatgtacagacatgatcagtttttaatgagatggaaaattaagtttttatgatgtatttctccttttacaggtaaagcatccagttgatggaaaatctctatatagagacagcaattggattagcaaagtgtaagtagagaaaagagcaaacactgcactagacaagtttcatcctacctgcgtgcccagctctgcccggagggtctgattaccagagaacgggtatggcatgcatggtaggaccacattttagaattcttggtgacgatggttgtttcctttgcagtgagaaactttcctttgacaatgctgcatatcctttccttgcatattctggaatcccagcagtttctttttgtttttgtgaggtaagacttaaaaactctacagcattttcatcagatcttggattaactttgaaatcaaaactttcagtatttaaaaatttttagcatgtgagtttttgcttagtcagtgagataattttagtaataggatttaataatttcttatagcacagggatatgatatttccatttaagatcagctgaataggggctggagagatggctcagcaggtaagagcactgactgctcatccaaaggtcatgagttcaaatcccagcaaccacatggtagctcacaaccatctttaataagatctgatgccctcttctggtgcatttcaagagacagctacagtgtactttgatataataaataataataataaataaatctttaaaaaaaatgatcagctgaatagtactcttctagatactaggtgttctcttaagcagcagcaatacaagtataaagtgatgatgagacagaacattgaattgatcacattgttataagagccagtgagaaggccaaaaggccaagaagagcagagttaaatgagaaagaagagatcctggggagcaatgatggaaattactgagtcaatttggaaagtcaggggatttaagaaacatctgagctgggcatgctggtgcatgcctttaatctcagcacttgggaggcagaggcaggcagatttctgagtttgagtccagcctggtctacagagtgagttccaggacagccagggccacacagagaaaccctgtcttggaaaaaaaaaaagggggtgggcatctggatttggagacttgcatggctggaattacttgatatgctattaaaaccataggatgaataagtggctgttttaatacatatgaagaactaagtgtcagggcctgtgggtctaaggacttacttcatagattttttttttttaagatttattatatgtgagtacattatagctattttcagacactccagaagagggcatcagatttttttacagatggttgtgagccaccatgtggttgctgggatttgaattcaggacctatggaagagcagtcagcattcttaactgctaagccatctcgccagcccctcataggtttgggtttttttgtttgtttgtttgtttttggttttttttttttttaattaatatatgtaagtacactgtagctgtcttcagacactccagaagagggagtcagatgttgttgcagatggttgtgagccaccatgtggttgctgggattagaactctggaccttccgaagagcagtcgggtgctcttacccactgagccatctcaccagccccaggtttttttaaactatagtgtgtaggtacatgtttggcctggtatatgtggaggtttgaggataactggcagtgagttcttcccaccatgcttgttgccttgatggtaaacccaaaaggtaaggctcctgctctaaatccacactagtataacagcctttctttgtcttctaggatgcagactatccttatttgggcactagattggatacctatgaggcattgactcagaaagttcctcagctcaaccaaatggttcgtacagcagcggaagtggctggtcagctcattattaaacttacccatgacgttgaattgaacctggactatgagatgtataacagcaaactactgtcatttatgaaggatctgaaccagttcaaaacagatatcagggtaagcacctaaattttcttttatttagatctcttatacttttaaaccttcctagttaccttctggtaactgtcatttcttctctcaacttgtatgaaattatgggtgtgggtgtgggtgggtgtgtgttttgtgagttctgaggcagagatttaatgttaatcagactggccttgaacttggaacaataatctgcctcagccttcagatcttggaattacagttgtctgccaccagatccagcttccccctctcgtgtgcactgtattacaacaacacttggctagatcagccttttgtatggcacatgaatgagatcatgtagcaggtgtatccaacctgtggcccagcaccacatttatttggtcaaggatttctatgactgcagcccaacacaatgataaaccttaacttgttatgtctgcactttaagttcacctatgtcatcttgagcatgaactttgtagatgcaacatcatttcccaatgtcaaaaatcggacatattgagaatggttgttgtgtgtgtgcaatcctagtacttggaatgtgcaggcaagagcatcctaagtttaaagccaggtttagctacataaggtatttaaggacatggcatccttttaaaaaaaaggttggacatgtctgatagtgtttgtcttactgtgcctgacatttacttgttacaagtgaatgtgtatacatattaattgcatttttctctacatttgtcagttgctgtgtaggtcatttccctctgtcgactattacgaataatatttgcttcacacagttgagaaatctcttgtttcatgtccccaagaggttcctgttgctgaagtatcagcatatgaagtcttttctttttctttctttttttattttttatttttttaagattttatttattttatttaaatatactagctgtcttcagacacaccagaagagggcatcagatctcattatggatggttgtgaaccatgtggctgctgggaattgaactcgatcttcagaagagcagtcaatgttcttaacctctgagctatctctccagccccccaccccccactttcttaagattttatttatttattatatgtaagttgaagtcttttctaggaggaaattgacttaaaacccacaatttatttgaaaaagttgttgggcacctgggatttcaagtgtagggtagacgccagtgttcccactgcagagctgtatcttctgtcatttgtgacccataagaaggttggacctggcttggatagaaagagtatgcagagctggtacctactgggctttatggttttttgttgttgttacatttttattagaggtgggtatcctatggcaaatgtgagggtcaggacagcttgaagacacaagcaggaagtgtttgtgtctggtcttggcgtttcgaatgcattcttcaggcgtgatgggcaaatacctttacctaatgagcagttacatttgcccagctaccgtgctacctgctgtctaaccttagttgtttttttaaattcacattagtaagttcttctcatctgactgttttagataagaaattgagggtttttttggcagcctaggccaccttagtgactgccagctagccctgggcaacaaatatgtgacattgctgacaccctactttaaaaggaagtataacttctaatgaacaatttaatgttcgtctttgacaggatatgggtctaagtctacagtggctgtattccgctcgtggagactacttccgtgctacttctagactaacaactgattttcataatgctgagaaaacaaacagatttgtcatgagggaaatcaatgatcgtattatgaaagtaagtgtgctcttaggaaagaaagaactaatgtatataaacttttagttagcaatgcttctatttatataaaggaaagtgggtaacaccaggtgcctacatcctttgctgctttagaattgaatacagattttggtttgtatcatgatctcaaagtgtcctatctaacctggaaatagaaaagacattaattttatgttaattgttttatacttttttctgagacagggtttctctgtgtagccctggctgtcctagaactcactctgtagaccaggctggcctcgaactcagaaatctgcccgcctctgcctcccaagtgctgggattagaggtgtgcaccaccactgcccggctgctttatacttttaaagccatttaggaacagcatggatagttcagtagtgagtgcctaagatgcttatgtgtatgttttgcccacatgtacatatatgtacctgtttgtacctggtatggagaaagcctgaagaggtcttccagtcaccgaggaactgcacttaaagcatttttaagctgccttgtgggttctagcatctaaacatagcatagtgagagtagcgagtggtcttaatctctaatcactgagcagtttctgcaaaccaaccctagcaatttttttttttagaagaaattttttttttaaagtttattgtctatatgtgagtacactgaagagggcatcatcggaatccattacagatggttgtgggccaagatgtggttgctggtaattgaacttggaagagcagtcaaatgctcttaactgctgagccacctctccagccctagggaaaaaaaaatctttaatgagttttgggcatgaatgaagccctattaattatcatagacaatttaggagaaatttaagacttccatatgctaattaggcagggtgtagtggtgtgcactgtaatcccagcactggaggctaggcaagaggttctgagttgaaggcatacatagcaaattccagattggcctgggcttaaaagtgagacttttatcttgaacaaccaaccacaccaaaacaaatagacaactgagcaggtaaagtaactaaaacctcaggtgcctaaatgaggttccaggaggccttgtaaaggtgagctgtgttgctgtgccctgcaggtcacactgagctcacaggtcctcctgcctgggccccactgctgggattaaagacaaggctataattaggtttttattattattattattagataaatgctatcccaaagccccctataccctcccccaccctgctccccaacccacccactcccgcttcctggtataattagtttttaatttaaaaacctcaataccatttaattttgcctcagacttaaaaatggtaatgtaactgagttctcagtagtctgattcagagaggttttaacgtttgaaagaagacacaagtcatagcactgtttaagcagtttcatctttgttacaggtggagtatcacttcctgtcgccctatgtatctccaagagagtctcctttccgacatatcttctggggctctggctctcacactctctcagctttagtggagaacttgaagcttcgtcaaaaaaatattactgcttttaatgaaaccctcttcagaaaccagttggccctggctacttggactattcagggagtcgcaaatgccctctctggtgacatttggaatattgacaatgagttttaaatgtaacatgcataattaaataagagcagggtagtctgtttctagacttgtgttggttgtgctaaattttcattagagctctaaaatctaatgttaaaattctacccaatcatctaatgtcttaggcagcagcttttagtgcggggttggacctacacttcaagtacaatggataacactttccatgtttgtgatatcttctcagattatctttaaaatttttgagtcctttgtaataacttcctctttgcttcatggtcatgaaaatgtcagaaccagttgtaagaacaatgctatatgtcctgagggcattaactagtgtcttttgaggtaggagaaagagtgtgcttgtggagggtcaacgtggtagttgggtagttggagattgccccgtctccatctgatcttccattgagctgtatgcccttaaggatgtagctggtttgcatttccctaaattagacagtaactttcagaagagatggaacttgttttcttgccagcaaggttgaaaataggtccttagctggaccaatttgtctgtttacaggaataagtaaggccttactggttaaccttggtgttctttatgatgagaccagaagccaaagacctcaagttttctctcctcttggcatctgccctatagtctttagttctttgtttttattttgtttttctttttttcccaacattttctgaaaaagaacaagttttagactcaatttgtcagacttgaaaagaacacactgccaagttttggccaaagtgttagtcttcaggaaagctttctatcattttggcactgagatatttattgtttatttatcagtgacagagttcactataaatagtgttgttttttttttatatatagaagataattatcggaagcagtgccttccataattatgacagttatactgtcgttttcttttaataaaagcagcatctgctaatgagacccacagatactggaagttttgcacttatggtcagcacttgcaactttaggaaggaagaatgccacaatccaaataatatgagctagaagaggattgggttaaataagagattcctaattgagttggggaaaaaaatgatagttttcctaagtgcagtgagttgtggccaagttaaatgtcatttaaaggctatggtagtacttacatctacaaaattttacagctcaatttattcaagatgtaactcaaaatcaattttgcaaaatttccagtacctttgtcacaaacttaactcacattatcgggagcagtgtcttccataatgcataaagaacaaggtagtttttgcctaccacagtgtctatatcggagacagtgatctccatatgttacactaagggtgtacgtaattatcgggaacagtgtttcccataattttcttcatgcaatgacatcttcagagcttgaagatcgttagtatctaacatgaattcctaacttcctgtagctccttagttttagttgcaaaaaacatttgtggtcattgagcatttggtgggtaaaatcaactgctgtaaaatcattacttccaagatccttttttaaaatgtgggtattttgttatctctggtttatggaataaaagcatacgtttataatgtttgctggtgacaaaggaatttaactatctccctttatttgcatgttacatgttatttcctaaatgtagttcttagaagtttgaattcatttttggtttttgggagggtagaaagtagagaataatgggtgttgggaagacaaagcttgcaaaaggatctttatgtacctgctcatcactatggtggctatgaattatgtaggtaatgagcaagatcacattaacaaagactagttaaccatcattacgcatctaatcagttttgccatggggtcagttcaaagctgccacctgagaatgtcactaggctctcagggtcttggcaccactcgcccaagttatatccaccagattattttgagcctcactgagttgttttgctactcagtcccttcagtcttcacagtgtttctcttgtaccagtatgagtatcaccgtgcataatgggattccaagtcttgaatgaaggcatgcattttacatagacgtctctgtgaaataacctttgttgtaagtggtgtttccagtcaaagcagtaagttggtaaggtttagtcttgggtgaaatgtggatctgagtaataagtagcttctgctacttatcaggttattgttggttaaaatgtagattttgaagataaaaatagatcttttgtcatgactcactgctagaatttgcatgacctttactgtgttagcttttgaatgccttttggtttggacttgccaacctatactgtctttgctgaaatgcccttataaatgtatacagctggtatgtaacaatgtgaagattccttacctgacttaataaaatacttcgataatactga

SEQ ID NO: 401 - protein, 760 aa, synthetic construct; identical to SEQ ID NO: 105
  REGION 1..760: note = Synthetic

SEQ ID NO: 402 - protein, 679 aa, synthetic construct
  REGION 1..679: note = Synthetic
MIGYLGYCKGVEPKTECERLAGTESPVREEPGEDFPAARRLYWDDLKRKLSEKLDSTDFTGTIKLLNENSYVPREAGSQKDENLALYVENQFREFKLSKVWRDQHFVKIQVKDSAQNSVIIVDKNGRLVYLVENPGGYVAYSKAATVTGKLVHANFGTKKDFEDLYTPVNGSIVIVRAGKITFAEKVANAESLNAIGVLIYMDQTKFPIVNAELSFFGHAHLGTGDPYTPGFPSFNHTQFPPSRSSGLPNIPVQTISRAAAEKLFGNMEGDCPSDWKTDSTCRMVTSESKNVKLTVSNVLKEIKILNIFGVIKGFVEPDHYVVVGAQRDAWGPGAAKSGVGTALLLKLAQMFSDMVLKDGFQPSRSIIFASWSAGDFGSVGATEWLEGYLSSLHLKAFTYINLDKAVLGTSNFKVSASPLLYTLIEKTMQNVKHPVTGQFLYQDSNWASKVEKLTLDNAAFPFLAYSGIPAVSFCFCEDTDYPYLGTTMDTYKELIERIPELNKVARAAAEVAGQFVIKLTHDVELNLDYERYNSQLLSFVRDLNQYRADIKEMGLSLQWLYSARGDFFRATSRLTTDFGNAEKTDRFVMKKLNDRVMRVEYHFLSPYVSPKESPFRHVFWGSGSHTLPALLENLKLRKQNNGAFNETLFRNQLALATWTIQGAANALSGDVWDIDNEF

SEQ ID NO: 403 - protein, 478 aa, synthetic construct
  REGION 1..478: note = Synthetic
MDQTKFPIVNAELSFFGHAHLGTGDPYTPGFPSFNHTQFPPSRSSGLPNIPVQTISRAAAEKLFGNMEGDCPSDWKTDSTCRMVTSESKNVKLTVSNVLKEIKILNIFGVIKGFVEPDHYVVVGAQRDAWGPGAAKSGVGTALLLKLAQMFSDMVLKDGFQPSRSIIFASWSAGDFGSVGATEWLEGYLSSLHLKAFTYINLDKAVLGTSNFKVSASPLLYTLIEKTMQNVKHPVTGQFLYQDSNWASKVEKLTLDNAAFPFLAYSGIPAVSFCFCEDTDYPYLGTTMDTYKELIERIPELNKVARAAAEVAGQFVIKLTHDVELNLDYERYNSQLLSFVRDLNQYRADIKEMGLSLQWLYSARGDFFRATSRLTTDFGNAEKTDRFVMKKLNDRVMRVEYHFLSPYVSPKESPFRHVFWGSGSHTLPALLENLKLRKQNNGAFNETLFRNQLALATWTIQGAANALSGDVWDIDNEF

SEQ ID NO: 404 - DNA, 5009 bp, synthetic construct
  misc_feature 1..5009: note = Synthetic
  source 1..5009: mol_type = other DNA
ggcggctcgggacggaggacgcgctagtgtgagtgcgggcttctagaactacaccgaccctcgtgtcctcccttcatcctgcggggctggctggagcggccgctccggtgctgtccagcagccatagggagccgcacggggagcgggaaagcggtcgcggccccaggcggggcggccgggatggagcggggccgcgagcctgtggggaaggggctgtggcggcgcctcgagcggctgcaggttcttctgtgtggcagttcagaatgatggatcaagctagatcagcattctctaacttgtttggtggagaaccattgtcatatacccggttcagcctggctcggcaagtagatggcgataacagtcatgtggagatgaaacttgctgtagatgaagaagaaaatgctgacaataacacaaaggccaatgtcacaaaaccaaaaaggtgtagtggaagtatctgctatgggactattgctgtgatcgtctttttcttgattggatttatgattggctacttgggctattgtaaaggggtagaaccaaaaactgagtgtgagagactggcaggaaccgagtctccagtgagggaggagccaggagaggacttccctgcagcacgtcgcttatattgggatgacctgaagagaaagttgtcggagaaactggacagcacagacttcaccggcaccatcaagctgctgaatgaaaattcatatgtccctcgtgaggctggatctcaaaaagatgaaaatcttgcgttgtatgttgaaaatcaatttcgtgaatttaaactcagcaaagtctggcgtgatcaacattttgttaagattcaggtcaaagacagcgctcaaaactcggtgatcatagttgataagaacggtagacttgtttacctggtggagaatcctgggggttatgtggcgtatagtaaggctgcaacagttactggtaaactggtccatgctaattttggtactaaaaaagattttgaggatttatacactcctgtgaatggatctatagtgattgtcagagcagggaaaatcacctttgcagaaaaggttgcaaatgctgaaagcttaaatgcaattggtgtgttgatatacatggaccagactaaatttcccattgttaacgcagaactttcattctttggacatgctcatctggggacaggtgacccttacacacctggattcccttccttcaatcacactcagtttccaccatctcggtcatcaggattgcctaatatacctgtccagacaatctccagagctgctgcagaaaagctgtttgggaatatggaaggagactgtccctctgactggaaaacagactctacatgtaggatggtaacctcagaaagcaagaatgtgaagctcactgtgagcaatgtgctgaaagagataaaaattcttaacatctttggagttattaaaggctttgtagaaccagatcactatgttgtagttggggcccagagagatgcatggggccctggagctgcaaaatccggtgtaggcacagctctcctattgaaacttgcccagatgttctcagatatggtcttaaaagatgggtttcagcccagcagaagcattatctttgccagttggagtgctggagactttggatcggttggtgccactgaatggctagagggatacctttcgtccctgcatttaaaggctttcacttatattaatctggataaagcggttcttggtaccagcaacttcaaggtttctgccagcccactgttgtatacgcttattgagaaaacaatgcaaaatgtgaagcatccggttactgggcaatttctatatcaggacagcaactgggccagcaaagttgagaaactcactttagacaatgctgctttccctttccttgcatattctggaatcccagcagtttctttctgtttttgcgaggacacagattatccttatttgggtaccaccatggacacctataaggaactgattgagaggattcctgagttgaacaaagtggcacgagcagctgcagaggtcgctggtcagttcgtgattaaactaacccatgatgttgaattgaacctggactatgagaggtacaacagccaactgctttcatttgtgagggatctgaaccaatacagagcagacataaaggaaatgggcctgagtttacagtggctgtattctgctcgtggagacttcttccgtgctacttccagactaacaacagatttcgggaatgctgagaaaacagacagatttgtcatgaagaaactcaatgatcgtgtcatgagagtggagtatcacttcctctctccctacgtatctccaaaagagtctcctttccgacatgtcttctggggctccggctctcacacgctgccagctttactggagaacttgaaactgcgtaaacaaaataacggtgcttttaatgaaacgctgttcagaaaccagttggctctagctacttggactattcagggagctgcaaatgccctctctggtgacgtttgggacattgacaatgagttttaaatgtgatacccatagcttccatgagaacagcagggtagtctggtttctagacttgtgctgatcgtgctaaattttcagtagggctacaaaacctgatgttaaaattccatcccatcatcttggtactactagatgtctttaggcagcagcttttaatacagggtagataacctgtacttcaagttaaagtgaataaccacttaaaaaatgtccatgatggaatattcccctatctctagaattttaagtgctttgtaatgggaactgcctctttcctgttgttgttaatgaaaatgtcagaaaccagttatgtgaatgatctctctgaatcctaagggctggtctctgctgaaggttgtaagtggtcgcttactttgagtgatcctccaacttcatttgatgctaaataggagataccaggttgaaagaccttctccaaatgagatctaagcctttccataaggaatgtagctggtttcctcattcctgaaagaaacagttaactttcagaagagatgggcttgttttcttgccaatgaggtctgaaatggaggtccttctgctggataaaatgaggttcaactgttgattgcaggaataaggccttaatatgttaacctcagtgtcatttatgaaaagaggggaccagaagccaaagacttagtatattttcttttcctctgtcccttcccccataagcctccatttagttctttgttatttttgtttcttccaaagcacattgaaagagaaccagtttcaggtgtttagttgcagactcagtttgtcagactttaaagaataatatgctgccaaattttggccaaagtgttaatcttaggggagagctttctgtccttttggcactgagatatttattgtttatttatcagtgacagagttcactataaatggtgtttttttaatagaatataattatcggaagcagtgccttccataattatgacagttatactgtcggttttttttaaataaaagcagcatctgctaataaaacccaacagatcctggaagttttgcatttatggtcaacacttaagggttttagaaaacagccgtcagccaaatgtaattgaataaagttgaagctaagatttagagatgaattaaatttaattaggggttgctaagaagcgagcactgaccagataagaatgctggttttcctaaatgcagtgaattgtgaccaagttataaatcaatgtcacttaaaggctgtggtagtactcctgcaaaattttatagctcagtttatccaaggtgtaactctaattcccattttgcaaaatttccagtacctttgtcacaatcctaacacattatcgggagcagtgtcttccataatgtataaagaacaaggtagtttttacctaccacagtgtctgtatcggagacagtgatctccatatgttacactaagggtgtaagtaattatcgggaacagtgtttcccataattttcttcatgcaatgacatcttcaaagcttgaagatcgttagtatctaacatgtatcccaactcctataattccctatcttttagttttagttgcagaaacattttgtggcattaagcattgggtgggtaaattcaaccactgtaaaatgaaattactacaaaatttgaaatttagcttgggtttttgttacctttatggtttctccaggtcctctacttaatgagatagtagcatacatttataatgtttgctattgacaagtcattttaactttatcacattatttgcatgttacctcctataaacttagtgcggacaagttttaatccagaattgaccttttgacttaaagcagggggactttgtatagaaggtttgggggctgtggggaaggagagtcccctgaaggtctgacacgtctgcctacccattcgtggtgatcaattaaatgtaggtatgaataagttcgaagcttcgtgagtgaaccatcattataaacgtgatgatcagctgtttgtcatagggcagttggaaacggccttctagggaaaagttcatagggtctcttcaggttcttagtgtcacttacctagatttacagcctcacttgaatgtgtcactactcacagtctctttaatcttcagttttatctttaatctcctcttttatcttggactgacatttagcgtagctaagtgaaaaggtcatagctgagattcctggttcgggtgttacgcacacgtacttaaatgaaagcatgtggcatgttcatcgtataacacaatatgaatacagggcatgcattttgcagcagtgagtctcttcagaaaacccttttctacagttagggttgagttacttcctatcaagccagtaccgtgctaacaggctcaatattcctgaatgaaatatcagactagtgacaagctcctggtcttgagatgtcttctcgttaaggagatgggccttttggaggtaaagg

SEQ ID NO: 405 - DNA, 1711 bp, synthetic construct
  misc_feature 1..1711: note = Synthetic
  source 1..1711: mol_type = other DNA
accgtcaactcagtagccacctccctccctgctcagctgtccagtactctggccagccatatactcccccttccccccataccaaaccttctctggttccctgacctcagtgagacagcagccggcctggggacctgggggagacacggaggaccccctggctggagctgacccacagagtagggaatcatggctggagaattggatagcagagtaatgtttgacctctggaaacatcacttacagggcttccggtcaaaattcactaggtaggagggtcatcagctgggaagaaccggcgcctgggaaacctggctggataggtatgggggagccaggccagtcccctagtcccaggtcctcccatggcagtcccccaactctaagcactctcactctcctgctgctcctctgtggacatgctcattctcaatgcaagatcctccgctgcaatgctgactcaccatcatatttaagaacatgcaggaatgcattgatcagaaggtgtatcaggctgaggtggataatcttcctgtagcctttgaagatggttctatcaatggaggtgaccgacctgggggatccagtttgtcgattcaaactgctaaccctgggaaccatgtggagatccaagctgcctacattggcacaactataatcattcggcagacagctgggcagctctccttctccatcaaggtagcagaggatgtggccatggccttctcagctgaacaggacctgcagctctgtgttggggggtgccctccaagtcagcgactctctcgatcagagcgcaatcgtcggggagctataaccattgatactgccagacggctgtgcaaggaagggcttccagtggaagatgcttacttccattcctgtgtctttgatgttttaatttctggtgatcccaactttaccgtggcagctcaggcagcactggaggatgcccgagccttcctgccagacttagagaagctgcatctcttcccctcagatgctggggttcctctttcctcagcaaccctcttagctccactcctttctgggctctttgttctgtggctttgcattcagtaaggggaccatcagtcccattactagtttggaaatgatttggagatacagattggcatagaagaatgtaaagaatcattaaaggaagcagggcctaggagacacgtgaaacaatgacattatccagagtcagatgaggctgcagtccagggttgaaattatcacagaataaggattctgggcaaggttactgcattccggatctctgtggggctcttcaccaatttttccagcctcatttatagtaaacaaattgttctaatccatttactgcagatttcacccttataagtttagaggtcatgaaggttttaatgatcagtaaagatttaagggttgagatttttaagaggcaagagctgaaagcagaagacatgatcattagccataagaaactcaaaggaggaagacataattagggaaagaagtctatttgatgaatatgtgtgtgtaaggtatgttctgctttcttgattcaaaaatgaagcaggcattgtctagctcttaggtgaagggagtctctgcttttgaagaatggcacaggtaggacagaagtatcatccctaccccctaactaatctgttattaaagctacaaattcttcacaccatcaaaaaaaaaaaaaaaaaaa

SEQ ID NO: 406 - DNA, 2048 bp, synthetic construct
  misc_feature 1..2048: note = Synthetic
  source 1..2048: mol_type = other DNA
accgtcaactcagtagccacctccctccctgctcagctgtccagtactctggccagccatatactcccccttccccccataccaaaccttctctggttccctgacctcagtgagacagcagccggcctggggacctgggggagacacggaggaccccctggctggagctgacccacagagtagggaatcatggctggagaattggatagcagagtaatgtttgacctctggaaacactcattctcaatgcaagatcctccgctgcaatgctgagtacgtatcgtccactctgagccttagaggtgggggttcatcaggagcacttcgaggaggaggaggaggaggccggggtggaggggtgggctctggcggcctctgtcgagccctccgctcctatgcgctctgcactcggcgcaccgcccgcacctgccgcggggacctcgccttccattcggcggtacatggcatcgaagacctgatgatccagcacaactgctcccgccagggccctacagcccctcccccgccccggggccccgcccttccaggcgcgggctccggcctccctgccccggacccttgtgactatgaaggccggttttcccggctgcatggtcgtcccccggggttcttgcattgcgcttccttcggggacccccatgtgcgcagcttccaccatcactttcacacatgccgtgtccaaggagcttggcctctactggataatgacttcctctttgtccaagccaccagctcccccatggcgttgggggccaacgctaccgccacccggaagctcaccatcatatttaagaacatgcaggaatgcattgatcagaaggtgtatcaggctgaggtggataatcttcctgtagcctttgaagatggttctatcaatggaggtgaccgacctgggggatccagtttgtcgattcaaactgctaaccctgggaaccatgtggagatccaagctgcctacattggcacaactataatcattcggcagacagctgggcagctctccttctccatcaaggtagcagaggatgtggccatggccttctcagctgaacaggacctgcagctctgtgttggggggtgccctccaagtcagcgactctctcgatcagagcgcaatcgtcggggagctataaccattgatactgccagacggctgtgcaaggaagggcttccagtggaagatgcttacttccattcctgtgtctttgatgttttaatttctggtgatcccaactttaccgtggcagctcaggcagcactggaggatgcccgagccttcctgccagacttagagaagctgcatctcttcccctcagatgctggggttcctctttcctcagcaaccctcttagctccactcctttctgggctctttgttctgtggctttgcattcagtaaggggaccatcagtcccattactagtttggaaatgatttggagatacagattggcatagaagaatgtaaagaatcattaaaggaagcagggcctaggagacacgtgaaacaatgacattatccagagtcagatgaggctgcagtccagggttgaaattatcacagaataaggattctgggcaaggttactgcattccggatctctgtggggctcttcaccaatttttccagcctcatttatagtaaacaaattgttctaatccatttactgcagatttcacccttataagtttagaggtcatgaaggttttaatgatcagtaaagatttaagggttgagatttttaagaggcaagagctgaaagcagaagacatgatcattagccataagaaactcaaaggaggaagacataattagggaaagaagtctatttgatgaatatgtgtgtgtaaggtatgttctgctttcttgattcaaaaatgaagcaggcattgtctagctcttaggtgaagggagtctctgcttttgaagaatggcacaggtaggacagaagtatcatccctaccccctaactaatctgttattaaagctacaaattcttcacaccatcaaaaaaaaaaaaaaaaaaa

SEQ ID NO: 407 - DNA, 1525 bp, synthetic construct
  misc_feature 1..1525: note = Synthetic
  source 1..1525: mol_type = other DNA
accgtcaactcagtagccacctccctccctgctcagctgtccagtactctggccagccatatactcccccttccccccataccaaaccttctctggttccctgacctcagtgagacagcagccggcctggggacctgggggagacacggaggaccccctggctggagctgacccacagagtagggaatcatggctggagaattggatagcagagtaatgtttgacctctggaaacactcattctcaatgcaagatcctccgctgcaatgctgactcaccatcatatttaagaacatgcaggaatgcattgatcagaaggtgtatcaggctgaggtggataatcttcctgtagcctttgaagatggttctatcaatggaggtgaccgacctgggggatccagtttgtcgattcaaactgctaaccctgggaaccatgtggagatccaagctgcctacattggcacaactataatcattcggcagacagctgggcagctctccttctccatcaaggtagcagaggatgtggccatggccttctcagctgaacaggacctgcagctctgtgttggggggtgccctccaagtcagcgactctctcgatcagagcgcaatcgtcggggagctataaccattgatactgccagacggctgtgcaaggaagggcttccagtggaagatgcttacttccattcctgtgtctttgatgttttaatttctggtgatcccaactttaccgtggcagctcaggcagcactggaggatgcccgagccttcctgccagacttagagaagctgcatctcttcccctcagatgctggggttcctctttcctcagcaaccctcttagctccactcctttctgggctctttgttctgtggctttgcattcagtaaggggaccatcagtcccattactagtttggaaatgatttggagatacagattggcatagaagaatgtaaagaatcattaaaggaagcagggcctaggagacacgtgaaacaatgacattatccagagtcagatgaggctgcagtccagggttgaaattatcacagaataaggattctgggcaaggttactgcattccggatctctgtggggctcttcaccaatttttccagcctcatttatagtaaacaaattgttctaatccatttactgcagatttcacccttataagtttagaggtcatgaaggttttaatgatcagtaaagatttaagggttgagatttttaagaggcaagagctgaaagcagaagacatgatcattagccataagaaactcaaaggaggaagacataattagggaaagaagtctatttgatgaatatgtgtgtgtaaggtatgttctgctttcttgattcaaaaatgaagcaggcattgtctagctcttaggtgaagggagtctctgcttttgaagaatggcacaggtaggacagaagtatcatccctaccccctaactaatctgttattaaagctacaaattcttcacaccatcaaaaaaaaaaaaaaaaaaa

SEQ ID NO: 408 - DNA, 1488 bp, synthetic construct
  misc_feature 1..1488: note = Synthetic
  source 1..1488: mol_type = other DNA
accgtcaactcagtagccacctccctccctgctcagctgtccagtactctggccagccatatactcccccttccccccataccaaaccttctctggttccctgacctcagtgagacagcagccggcctggggacctgggggagacacggaggaccccctggctggagctgacccacagagtagggaatcatggctggagaattggatagcagagtaatgtttgacctctggaaacactcaccatcatatttaagaacatgcaggaatgcattgatcagaaggtgtatcaggctgaggtggataatcttcctgtagcctttgaagatggttctatcaatggaggtgaccgacctgggggatccagtttgtcgattcaaactgctaaccctgggaaccatgtggagatccaagctgcctacattggcacaactataatcattcggcagacagctgggcagctctccttctccatcaaggtagcagaggatgtggccatggccttctcagctgaacaggacctgcagctctgtgttggggggtgccctccaagtcagcgactctctcgatcagagcgcaatcgtcggggagctataaccattgatactgccagacggctgtgcaaggaagggcttccagtggaagatgcttacttccattcctgtgtctttgatgttttaatttctggtgatcccaactttaccgtggcagctcaggcagcactggaggatgcccgagccttcctgccagacttagagaagctgcatctcttcccctcagatgctggggttcctctttcctcagcaaccctcttagctccactcctttctgggctctttgttctgtggctttgcattcagtaaggggaccatcagtcccattactagtttggaaatgatttggagatacagattggcatagaagaatgtaaagaatcattaaaggaagcagggcctaggagacacgtgaaacaatgacattatccagagtcagatgaggctgcagtccagggttgaaattatcacagaataaggattctgggcaaggttactgcattccggatctctgtggggctcttcaccaatttttccagcctcatttatagtaaacaaattgttctaatccatttactgcagatttcacccttataagtttagaggtcatgaaggttttaatgatcagtaaagatttaagggttgagatttttaagaggcaagagctgaaagcagaagacatgatcattagccataagaaactcaaaggaggaagacataattagggaaagaagtctatttgatgaatatgtgtgtgtaaggtatgttctgctttcttgattcaaaaatgaagcaggcattgtctagctcttaggtgaagggagtctctgcttttgaagaatggcacaggtaggacagaagtatcatccctaccccctaactaatctgttattaaagctacaaattcttcacaccatcaaaaaaaaaaaaaaaaaaa

SEQ ID NO: 409 - DNA, 2234 bp, synthetic construct
  misc_feature 1..2234: note = Synthetic
  source 1..2234: mol_type = other DNA
accgtcaactcagtagccacctccctccctgctcagctgtccagtactctggccagccatatactcccccttccccccataccaaaccttctctggttccctgacctcagtgagacagcagccggcctggggacctgggggagacacggaggaccccctggctggagctgacccacagagtagggaatcatggctggagaattggatagcagagtaatgtttgacctctggaaacatcacttacagggcttccggtcaaaattcactaggtaggagggtcatcagctgggaagaaccggcgcctgggaaacctggctggataggtatgggggagccaggccagtcccctagtcccaggtcctcccatggcagtcccccaactctaagcactctcactctcctgctgctcctctgtggacatgctcattctcaatgcaagatcctccgctgcaatgctgagtacgtatcgtccactctgagccttagaggtgggggttcatcaggagcacttcgaggaggaggaggaggaggccggggtggaggggtgggctctggcggcctctgtcgagccctccgctcctatgcgctctgcactcggcgcaccgcccgcacctgccgcggggacctcgccttccattcggcggtacatggcatcgaagacctgatgatccagcacaactgctcccgccagggccctacagcccctcccccgccccggggccccgcccttccaggcgcgggctccggcctccctgccccggacccttgtgactatgaaggccggttttcccggctgcatggtcgtcccccggggttcttgcattgcgcttccttcggggacccccatgtgcgcagcttccaccatcactttcacacatgccgtgtccaaggagcttggcctctactggataatgacttcctctttgtccaagccaccagctcccccatggcgttgggggccaacgctaccgccacccggaagctcaccatcatatttaagaacatgcaggaatgcattgatcagaaggtgtatcaggctgaggtggataatcttcctgtagcctttgaagatggttctatcaatggaggtgaccgacctgggggatccagtttgtcgattcaaactgctaaccctgggaaccatgtggagatccaagctgcctacattggcacaactataatcattcggcagacagctgggcagctctccttctccatcaaggtagcagaggatgtggccatggccttctcagctgaacaggacctgcagctctgtgttggggggtgccctccaagtcagcgactctctcgatcagagcgcaatcgtcggggagctataaccattgatactgccagacggctgtgcaaggaagggcttccagtggaagatgcttacttccattcctgtgtctttgatgttttaatttctggtgatcccaactttaccgtggcagctcaggcagcactggaggatgcccgagccttcctgccagacttagagaagctgcatctcttcccctcagatgctggggttcctctttcctcagcaaccctcttagctccactcctttctgggctctttgttctgtggctttgcattcagtaaggggaccatcagtcccattactagtttggaaatgatttggagatacagattggcatagaagaatgtaaagaatcattaaaggaagcagggcctaggagacacgtgaaacaatgacattatccagagtcagatgaggctgcagtccagggttgaaattatcacagaataaggattctgggcaaggttactgcattccggatctctgtggggctcttcaccaatttttccagcctcatttatagtaaacaaattgttctaatccatttactgcagatttcacccttataagtttagaggtcatgaaggttttaatgatcagtaaagatttaagggttgagatttttaagaggcaagagctgaaagcagaagacatgatcattagccataagaaactcaaaggaggaagacataattagggaaagaagtctatttgatgaatatgtgtgtgtaaggtatgttctgctttcttgattcaaaaatgaagcaggcattgtctagctcttaggtgaagggagtctctgcttttgaagaatggcacaggtaggacagaagtatcatccctaccccctaactaatctgttattaaagctacaaattcttcacaccatcaaaaaaaaaaaaaaaaaaa

SEQ ID NO: 410 - protein, 1914 aa, Homo sapiens
MGDVKLVASSHISKTSLSVDPSRVDSMPLTEAPAFILPPRNLCIKEGATAKFEGRVRGYPEPQVTWHRNGQPITSGGRFLLDCGIRGTFSLVIHAVHEEDRGKYTCEATNGSGARQVTVELTVEGSFAKQLGQPVVSKTLGDRFSAPAVETRPSIWGECPPKFATKLGRVVVKEGQMGRFSCKITGRPQPQVTWLKGNVPLQPSARVSVSEKNGMQVLEIHGVNQDDVGVYTCLVVNGSGKASMSAELSIQGLDSANRSFVRETKATNSDVRKEVTNVISKESKLDSLEAAAKSKNCSSPQRGGSPPWAANSQPQPPRESKLESCKDSPRTAPQTPVLQKTSSSITLQAARVQPEPRAPGLGVLSPSGEERKRPAPPRPATFPTRQPGLGSQDVVSKAANRRIPMEGQRDSAFPKFESKPQSQEVKENQTVKFRCEVSGIPKPEVAWFLEGTPVRRQEGSIEVYEDAGSHYLCLLKARTRDSGTYSCTASNAQGQLSCSWTLQVERLAVMEVAPSFSSVLKDCAVIEGQDFVLQCSVRGTPVPRITWLLNGQPIQYARSTCEAGVAELHIQDALPEDHGTYTCLAENALGQVSCSAWVTVHEKKSSRKSEYLLPVAPSKPTAPIFLQGLSDLKVMDGSQVTMTVQVSGNPPPEVIWLHNGNEIQESEDFHFEQRGTQHSLCIQEVFPEDTGTYTCEAWNSAGEVRTQAVLTVQEPHDGTQPWFISKPRSVTASLGQSVLISCAIAGDPFPTVHWLRDGKALCKDTGHFEVLQNEDVFTLVLKKVQPWHAGQYEILLKNRVGECSCQVSLMLQNSSARALPRGREPASCEDLCGGGVGADGGGSDRYGSLRPGWPARGQGWLEEEDGEDVRGVLKRRVETRQHTEEAIRQQEVEQLDFRDLLGKKVSTKTLSEDDLKEIPAEQMDFRANLQRQVKPKTVSEEERKVHSPQQVDFRSVLAKKGTSKTPVPEKVPPPKPATPDFRSVLGGKKKLPAENGSSSAETLNAKAVESSKPLSNAQPSGPLKPVGNAKPAETLKPMGNAKPAETLKPMGNAKPDENLKSASKEELKKDVKNDVNCKRGHAGTTDNEKRSESQGTAPAFKQKLQDVHVAEGKKLLLQCQVSSDPPATIIWTLNGKTLKTTKFIILSQEGSLCSVSIEKALPEDRGLYKCVAKNDAGQAECSCQVTVDDAPASENTKAPEMKSRRPKSSLPPVLGTESDATVKKKPAPKTPPKAAMPPQIIQFPEDQKVRAGESVELFGKVTGTQPITCTWMKFRKQIQESEHMKVENSENGSKLTILAARQEHCGCYTLLVENKLGSRQAQVNLTVVDKPDPPAGTPCASDIRSSSLTLSWYGSSYDGGSAVQSYSIEIWDSANKTWKELATCRSTSFNVQDLLPDHEYKFRVRAINVYGTSEPSQESELTTVGEKPEEPKDEVEVSDDDEKEPEVDYRTVTINTEQKVSDFYDIEERLGSGKFGQVFRLVEKKTRKVWAGKFFKAYSAKEKENIRQEISIMNCLHHPKLVQCVDAFEEKANIVMVLEIVSGGELFERIIDEDFELTERECIKYMRQISEGVEYIHKQGIVHLDLKPENIMCVNKTGTRIKLIDFGLARRLENAGSLKVLFGTPEFVAPEVINYEPIGYATDMWSIGVICYILVSGLSPFMGDNDNETLANVTSATWDFDDEAFDEISDDAKDFISNLLKKDMKNRLDCTQCLQHPWLMKDTKNMEAKKLSKDRMKKYMARRKWQKTGNAVRAIGRLSSMAMISGLSGRKSSTGSPTSPLNAEKLESEEDVSQAFLEAVAEEKPHVKPYFSKTIRDLEVVEGSAARFDCKIEGYPDPEVVWFKDDQSIRESRHFQIDYDEDGNCSLIISDVCGDDDAKYTCKAVNSLGEATCTAELIVETMEEGEGEGEEEEE

SEQ ID NO: 411 - DNA, 10113 bp, Homo sapiens
  source 1..10113: mol_type = genomic DNA
gggctccccgcgccgcccggtcggcagcagggcgctgagcgagctcggagcccgcgctgtgcgcctgcggccggggcgccccgccgagcgccggtgccccggctcccgggccgccttcgccgcgcgggaaggattcttcaaaattaacagaaaccaattcgggccagctgaagagaaaaaataaaggtggctcccggctgcctctgctgcagttcagagcaacttcaggagcttcccagccgagagcttcaggacgcctttcctgtcccactggcccagttgccacaacaaacaacagagaagacggtgaccatgggggatgtgaagctggttgcctcgtcacacatttccaaaacctccctcagtgtggatccctcaagagttgactccatgcccctgacagaggcccctgctttcattttgccccctcggaacctctgcatcaaagaaggagccaccgccaagttcgaagggcgggtccggggttacccagagccccaggtgacatggcacagaaacgggcaacccatcaccagcgggggccgcttcctgctggattgcggcatccgggggactttcagccttgtgattcatgctgtccatgaggaggacaggggaaagtatacctgtgaagccaccaatggcagtggtgctcgccaggtgacagtggagttgacagtagaaggaagttttgcgaagcagcttggtcagcctgttgtttccaaaaccttaggggatagattttcagctccagcagtggagacccgtcctagcatctggggggagtgcccaccaaagtttgctaccaagctgggccgagttgtggtcaaagaaggacagatgggacgattctcctgcaagatcactggccggccccaaccgcaggtcacctggctcaagggaaatgttccactgcagccgagtgcccgtgtgtctgtgtctgagaagaacggcatgcaggttctggaaatccatggagtcaaccaagatgacgtgggagtgtacacgtgcctggtggtgaacgggtcggggaaggcctcgatgtcagctgaactttccatccaaggtttggacagtgccaataggtcatttgtgagagaaacaaaagccaccaattcagatgtcaggaaagaggtgaccaatgtaatctcaaaggagtcgaagctggacagtctggaggctgcagccaaaagcaagaactgctccagcccccagagaggtggctccccaccctgggctgcaaacagccagcctcagcccccaagggagtccaagctggagtcatgcaaggactcgcccagaacggccccgcagaccccggtccttcagaagacttccagctccatcaccctgcaggccgcaagagttcagccggaaccaagagcaccaggcctgggggtcctatcaccttctggagaagagaggaagaggccagctcctccccgtccagccaccttccccaccaggcagcctggcctggggagccaagatgttgtgagcaaggctgctaacaggagaatccccatggagggccagagggattcagcattccccaaatttgagagcaagccccaaagccaggaggtcaaggaaaatcaaactgtcaagttcagatgtgaagtttccgggattccaaagcctgaagtggcctggttcctggaaggcacccccgtgaggagacaggaaggcagcattgaggtttatgaagatgctggctcccattacctctgcctgctgaaagcccggaccagggacagtgggacatacagctgcactgcttccaacgcccaaggccagctgtcctgtagctggaccctccaagtggaaaggcttgccgtgatggaggtggccccctccttctccagtgtcctgaaggactgcgctgttattgagggccaggattttgtgctgcagtgctccgtacgggggaccccagtgccccggatcacttggctgctgaatgggcagcccatccagtacgctcgctccacctgcgaggccggcgtggctgagctccacatccaggatgccctgccggaggaccatggcacctacacctgcctagctgagaatgccttggggcaggtgtcctgcagcgcctgggtcaccgtccatgaaaagaagagtagcaggaagagtgagtaccttctgcctgtggctcccagcaagcccactgcacccatcttcctgcagggcctctctgatctcaaagtcatggatggaagccaggtcactatgactgtccaagtgtcagggaatccaccccctgaagtcatctggctgcacaatgggaatgagatccaagagtcagaggacttccactttgaacagagaggaactcagcacagcctttgtatccaggaagtgttcccggaggacacgggcacgtacacctgcgaggcctggaacagcgctggagaggtccgcacccaggccgtgctcacggtacaagagcctcacgatggcacccagccctggttcatcagtaagcctcgctcagtgacagcctccctgggccagagtgtcctcatctcctgcgccatagctggtgacccctttcctaccgtgcactggctcagagatggcaaagccctctgcaaagacactggccacttcgaggtgcttcagaatgaggacgtgttcaccctggttctaaagaaggtgcagccctggcatgccggccagtatgagatcctgctcaagaaccgggttggcgaatgcagttgccaggtgtcactgatgctacagaacagctctgccagagcccttccacgggggagggagcctgccagctgcgaggacctctgtggtggaggagttggtgctgatggtggtggtagtgaccgctatgggtccctgaggcctggctggccagcaagagggcagggttggctagaggaggaagacggcgaggacgtgcgaggggtgctgaagaggcgcgtggagacgaggcagcacactgaggaggcgatccgccagcaggaggtggagcagctggacttccgagacctcctggggaagaaggtgagtacaaagaccctatcggaagacgacctgaaggagatcccagccgagcagatggatttccgtgccaacctgcagcggcaagtgaagccaaagactgtgtctgaggaagagaggaaggtgcacagcccccagcaggtcgattttcgctctgtcctggccaagaaggggacttccaagacccccgtgcctgagaaggtgccaccgccaaaacctgccaccccggattttcgctcagtgctgggtggcaagaagaaattaccagcagagaatggcagcagcagtgccgagaccctgaatgccaaggcagtggagagttccaagcccctgagcaatgcacagccttcagggcccttgaaacccgtgggcaacgccaagcctgctgagaccctgaagccaatgggcaacgccaagcctgccgagaccctgaagcccatgggcaatgccaagcctgatgagaacctgaaatccgctagcaaagaagaactcaagaaagacgttaagaatgatgtgaactgcaagagaggccatgcagggaccacagataatgaaaagagatcagagagccaggggacagccccagccttcaagcagaagctgcaagatgttcatgtggcagagggcaagaagctgctgctccagtgccaggtgtcttctgaccccccagccaccatcatctggacgctgaacggaaagaccctcaagaccaccaagttcatcatcctctcccaggaaggctcactctgctccgtctccatcgagaaggcactgcctgaggacagaggcttatacaagtgtgtagccaagaatgacgctggccaggcggagtgctcctgccaagtcaccgtggatgatgctccagccagtgagaacaccaaggccccagagatgaaatcccggaggcccaagagctctcttcctcccgtgctaggaactgagagtgatgcgactgtgaaaaagaaacctgcccccaagacacctccgaaggcagcaatgccccctcagatcatccagttccctgaggaccagaaggtacgcgcaggagagtcagtggagctgtttggcaaagtgacaggcactcagcccatcacctgtacctggatgaagttccgaaagcagatccaggaaagcgagcacatgaaggtggagaacagcgagaatggcagcaagctcaccatcctggccgcgcgccaggagcactgcggctgctacacactgctggtggagaacaagctgggcagcaggcaggcccaggtcaacctcactgtcgtggataagccagaccccccagctggcacaccttgtgcctctgacattcggagctcctcactgaccctgtcctggtatggctcctcatatgatgggggcagtgctgtacagtcctacagcatcgagatctgggactcagccaacaagacgtggaaggaactagccacatgccgcagcacctctttcaacgtccaggacctgctgcctgaccacgaatataagttccgtgtacgtgcaatcaacgtgtatggaaccagtgagccaagccaggagtctgaactcacaacggtaggagagaaacctgaagagccgaaggatgaagtggaggtgtcagatgatgatgagaaggagcccgaggttgattaccggacagtgacaatcaatactgaacaaaaagtatctgacttctacgacattgaggagagattaggatctgggaaatttggacaggtctttcgacttgtagaaaagaaaactcgaaaagtctgggcagggaagttcttcaaggcatattcagcaaaagagaaagagaatatccggcaggagattagcatcatgaactgcctccaccaccctaagctggtccagtgtgtggatgcctttgaagaaaaggccaacatcgtcatggtcctggagatcgtgtcaggaggggagctgtttgagcgcatcattgacgaggactttgagctgacggagcgtgagtgcatcaagtacatgcggcagatctcggagggagtggagtacatccacaagcagggcatcgtgcacctggacctcaagccggagaacatcatgtgtgtcaacaagacgggcaccaggatcaagctcatcgactttggtctggccaggaggctggagaatgcggggtctctgaaggtcctctttggcaccccagaatttgtggctcctgaagtgatcaactatgagcccatcggctacgccacagacatgtggagcatcggggtcatctgctacatcctagtcagtggcctttcccccttcatgggagacaacgataacgaaaccttggccaacgttacctcagccacctgggacttcgacgacgaggcattcgatgagatctccgacgatgccaaggatttcatcagcaatctgctgaagaaagatatgaaaaaccgcctggactgcacgcagtgccttcagcatccatggctaatgaaagataccaagaacatggaggccaagaaactctccaaggaccggatgaagaagtacatggcaagaaggaaatggcagaaaacgggcaatgctgtgagagccattggaagactgtcctctatggcaatgatctcagggctcagtggcaggaaatcctcaacagggtcaccaaccagcccgctcaatgcagaaaaactagaatctgaagaagatgtgtcccaagctttccttgaggctgttgctgaggaaaagcctcatgtaaaaccctatttctctaagaccattcgcgatttagaagttgtggagggaagtgctgctagatttgactgcaagattgaaggatacccagaccccgaggttgtctggttcaaagatgaccagtcaatcagggagtcccgccacttccagatagactacgatgaggacgggaactgctctttaattattagtgatgtttgcggggatgacgatgccaagtacacctgcaaggctgtcaacagtcttggagaagccacctgcacagcagagctcattgtggaaacgatggaggaaggtgaaggggaaggggaagaggaagaagagtgaaacaaagccagagaaaagcagtttctaagtcatattaaaaggactatttctctaaaactcaaaaaaaaaaaaaaaactcaagatagtaaaagcacctagtgtgatagattatcggttaggtcatttgtgggttgattcttcagaaacagcagttgatacctagcagcgttattgatgggcattaatctatgttagttggcaccttaagatactagtgcagctagatttcatttagggaaatcaccagtaacttgactgaccaattgattttagagagaaagtaaccaaaccaaatatttatctgggcaaagtcataaattctccacttgaatgcgctcatgaaaaataaggccaaaacaagagttctgggccacagctcagcccagagggttcctggggatgggaggcctctctctccccaccccctgactctagagaactgggttttctcccagtactccagcaattcatttctgaaagcagttgagccactttattccaaagtacactgcagatgttcaaactctccatttctctttccccttccacctgccagttttgctgactctcaacttgtcatgagtgtaagcattaaggacattatgcttcttcgattctgaagacaggtccctgctcatggatgactctggcttccttaggaaaatatttttcttccaaaatcagtaggaaatctaaacttatcccctctttgcagatgtctagcagcttcagacatttggttaagaacccatgggaaaaaaaaaatccttgctaatgtggtttcctttgtaaaccaggattcttatttgtgctgttatagaatatcagctctgaacgtgtggtaaagatttttgtgtttgaatataggagaaatcagtttgctgaaaagttagtcttaattatctattggccacgatgaaacagatttcaactgataaagagctggagaactccatgtactttggaatctcctccaagatagccagagtttaatacatcttcattctcaacactctccaaagaacttgacctaccttatgggttccatatttttcttcttaaatgtgcatcaatcatgccttgcccccaacctttaaatatattcttagacctggtaaatgcactcagacttgcgtctttaggaatttttaactttctttcactacattggcacttaaattttttctttataaagctttttgaaggtcataaacaaagaccataattgatgatagacctaatacatttcctctgtgtgtgtgtgtaacattccaaatactttttttttcttttccactgtttgtaaggtgcaacaatttaatatttttaagggactttttaagagttccttaagaaccaatttaaaattacttcagtgcaatcctacacagtatcaacattagaattttgatattagtcttatgttatcttccattctatttttatctgctttttgctgctagtttcaaactgccagtatttttccttttgcttttaaaatagttacaatatttttcatgatagccacagtattgccacagtttattataataaagggtttttatttgatttagcgcattcaaagcttttttctatcacttttgtgttcagaatataacctttgtgtgcgtgtatgttgtgtgtgtgcatgtgtggcgtatatgtgtgttacaggttaatgccttcttggaattgtgttaatgttctcttggtttattatgccatcagaatggtaaatgagaacactacaactgtagtcagctcacaatttttaaataaaggataccacagtgcatgctgtttgttcaatctttgcagacttctctttctttccatgctaccagttgtaaaggacacagctatatcctggaaatgaaaaacaaacactgtggtgcctagatgtgaagaactggcttatgtggttgtgttttgctatggaacagaatgatttaggaagttcttgtttatataggtagccgaatttacacatttagttcaaaatttctcttgagcatcagcttagtactatatcaatcattctagaaggatatcttatagagcaggtgtccccaacccccggtaagtagcctgttaggaaccaggtcacacataaggaggttagcagtgggcaagtgagcaaagcatcatctatatttacagccgatccccattgctcgcattaccgcctgagctctgcctcctgtcagatcagcggcagcatcaggttctctcaggaacgaactctattgtgaactgctcatgtgagggatctaggtttcacgctccttatgagaatctaacacctgatgatctgtcactgtctcccatcacccctagatgggacagtctagttgcaggaaaacaagctcagggcttccactgattctacattatgatgagttgtatacttattttatattataataaaatatattattacaatgtaataataatagaaataaaatgcacaatacatgtaatgtgcttgaataatcccaaaaccaccccctctcctggtccatggaaaaactgtcttccatgaaagtggtccctggtgccaaaaaggttagggaccactgttacagagtatcaggtcctcaagatgctaaaatctatatgacatttttaacatgtgacattatcatcatcatcatcatcatcatcactgatgatactatttaccagggcatggtttgaattggtgactttggtgcagttcattattggcagccaaatgctttatccataccttcatattgaagaatttgttatcaggaaactaccagtcctgctttacaggaagtctgttatcagatatcagatggcaagttccccatgtcttcagatgttcaaacaatattgtggatggtctagaaagagtttaagacatgctgttaaatgtagggctagataattctctgattctttgatgtagtctggaaagaaacaatccattgtccagttaataaatatttagtgttttcatttttaagacactcacaatccacaaatgtccctaacaatttattatttttaaagaaaatgactttttattccttgctagtgaaaaatgtacaatttatatgctgcactgagaaaaataacagatatactttcttccattcattttcatcccaaacatataaaaaataatccattgattgttccttgcattgcatatcttattaaaagatatttcctacatgcaactaataagacatgctgactgttgtcagctctaaatttatgtaaagattttttatttttgttaaaatgtttgaaatttgctttttgctccacacctcacctgtttttgataaatctgtgctaataagtacataggaggtaataaataattgagttgtgagaaacccaattctccatttttcaagaaaacacaagtagcactactctctttatcccttgggactccttcctgtaatttgaaagggggggctaatgttggtggcagttgttgctaaggatctctgcacagagttagggcttcactctcggcttcctggttagatggggccatgtgactagtcctagtcagtgagctgtgaccagaagtgatgtatgtaccctcgggaccagagcatttatgtgctggtacaagcctctccataatgacgggcaacacatgagatggtggctgctgcagccatctgggtctctagccaacccaaaatggggacataacacaagcaagaaataaacatttgttcttataaatcaccaagattttggggttctcagtggctgcaacataacctagactatcctgatacaggcttatcaccatgttctggatgtgtggtgaccaggatggtagccactactcacaagtggctatttaaatttaagttactttaaaaaataaaataaaaaattcagttcctcagttgtatgagttacatttcaaatgctcgacagtcacatgtacatcacttttcaaattatgtgaaattaaaactgaaaagcttgtgtgaaagtctagagagtatggtctatagtttcatcaattgtattggataatatagtctcgatactcaa

SEQ ID NO: 412 - DNA, 32306 bp, synthetic construct
  misc_feature 1..32306: note = Synthetic
  source 1..32306: mol_type = other DNA
gggctccccgcgccgcccggtcggcagcagggcgctgagcgagctcggagcccgcgctgtgcgcctgcggccggggcgccccgccgagcgccggtgccccggctcccgggccgccttcgccgcgcgggtgagtgagcccgccccatgcttttgtccaggcgcgggccctggaagtcaaggctccgagggtgggagttctgggtgggggctgggacccccaccgtctgtgcctcccgactcccctaatggagaggggccccggggtgcggcgaggagtcaggggcgtaaggagacgaccccagtgacgccaggctgcacgagttttcttttggggagatgaagtgcttggggacactgatgcgattgcctttctaggaatcatccgaagggggtgcctttgatttgaggggcggaggagaagcggacccttctcccagctcccagaccctcgctagaggactcggtgacggcctctgggaagggggtgccacgtgaaggtccttccagcccaaatgtgattccgggaaggtagggcggggaaggcggcccgcgagtgccagacctggccatcccaggcgaagctggggcgcgggctttgcagacttgttcctactccatactcctcatttaagctccttacctcgctctgcctccttcgcgttaactggggtcccattgttgagggaccttgttcgccgatgattgcagttggaaagttttggataaacttctcaggagatgtgagttgtcaatggttgaggtagacccctccctggaacttatggaactaaaacccttcaagacccaaaggactgaatttctaggagtggcattgcagatgtgaagatgggctgatggggaaatggtttcaaggatatatattttttttagattggggtgtgtgtgttggggtgcggggcactttctatttcgtagccagaaggagaagacccagctctactagagtctagagggagtaaaattagctgttgtgattcagggagctgggtgggtgtagggaaacacctgggcagtgggcatgatgccagacctcaggccgttggtttttaccatccctcctctccccaagtgcaaagaccagagtatatgcaatgacccgcccaccccacagcctttgagagcctgccctggagctgcatcccccttccaagagaggctgtgttcttctccacctgaatggaatactttttgtcaaaatgcacttatcaataaattatttccagatggtgggcttaggaggaccatttggggaaccccgcccacacttcaaagaatcaggaatcaacaatgcaagtctctgggagaagtgtaggtgcatctggtgactttactaggttcctacaaggcatttagggttctaatagaactgttttcttttctcttaaattcttgacctccttctctcttccgtgattctcttagtctcttccccgcctgcacactgtgggactgtggaggatgatgctgctggcaccacagtgctctagggcagcatggaattttccttcctgcccagagtgaggttacccctttttctcccactctcagtgggccaggagccttgggtctgggaggaacctgagcagttggtcctgggtccggagtggttggactctggatgctggattgggtagcgggtactctggggacatgcacaagagctttttttgccaagatgtgcaggtctgtctcattgttcactgatgatacaaaggatgctggacctcatttgcagctaagcatgagcttggagaaccaccccacagtggggaagcatttatgctggtttatctcccatgttcagtttcttttgtgtaataactggctagctgaggaggagggtagctgcagcattgtagatgtttccttgtcttatttttatttttattttttattttgagacagggtctggctctgttgcccaggctggagtacagtggcgtgatctcagctcactgcaaccttgacctaccaggctcaaggaatcctccacctcagcctcctgagtagcagggactacaggtgtgtgccaccacacctggctagttttttggattttttgtagagatggggtcctaccatgttgtccatactagtctaatgggctcaagtgatcgcccacctctgcctcccaaagtgctgggttacaggcatgagccactgcacccagccagagtagttgctgtttgtgtgaggtttgctcaccccttcatcaggggctgcttccccaggggccagatcttagaaaacatatgcagagcagactaggccttggaacattcctaggctaactggtaaggccaggtggccccacctgctgcctgaaaatggtagacagacagctacagtcactgcagaggaggggctcctggctggcaggtggcgggggtaatctgctgagaaggcttgtcagagaaggaggtgacccagatggtgcagaggggagaggcctttgagttccaagggtggggaaaggttctgggtctctggctagggagatctttgctggtctcagaggcatagattgtgaatgcgctggggtcaccatatactcagtgtctttgagaatgaccccttgcttttatcctcaaaatataagatgagcctagagtttgaaacacaactagttggcttgtctgtcttttaggaagttcataaggtggggtgggggtttcagaatgcagccttgcttggggacatgggtacagtgtcccatgagtatggggtgtcttatttagtatctttctgagaacaatacttgggagtctggaaatataagcctacttggaagcccagctgcacctctcacagctcaaaccaacccacacaggctgggagattgttcattcttaaaagcttcctgtcctgtcttttcagcaaatgtagtaaaatttagaaacaacacttaaaaagtatcctttcccaacaaaagacaatgtcctcgctcaacttggccagcagagggtgcatgcagaggacatgaggcagggccatttgcatggaaaatgtccatgtggatgcttaggcctgagcagggtctattgggtggcctgagtgctcagaatcaaggaaccgtccagcagtgagccagagtgggacagaacgatgtcactgtgatgagctcctatgccatgtgacttctatctcttccctgtgctcccccagcctcctaccttacaagcaggcagacatggttgtgcggggaagcagtgcccatacaagccacgcccctctcccacctgcaccattctgcagatggattctctttattcttccttgagttttggctgcacacttttccattcgtttgatgccaacaggttgagcaaatgcattcccctcacaaactcaaggtgggtggacctccgtatttgcactgcgggccaacaggtgcatccctcctccttgttgcatgcacctggtgtgtgagggctgcagcccccatgaaatttactgacagccagcccagtcagctggggcaggaggagagccagcaacagttgctgcctcatgggctggaaggtaaggctgtgtttccagatgctcccaccaccttcttttccctgccctcctgctcactgtacttcagtgtctgagggtgaatgggcaccccactagggagctgtggaaatttttgtgtagatccagcttcttagatttcccacgttgtccccatcccccctctgttggtacttccttgccccccttccaccctctgctcctctccttccctgggtcttcagtgcagagccctctggagacagaaagcccctttggagacaaaagaaaagggatgaggagaggatttccttttctttcagacctgcttcttgattttttttcccttggctctgggcgctcagatctgatgctaatttgttaatccaggaccttatgggttatttctcataatctttgggggaaccgaacacctgcaacttggggcttttatagttgaggatgctgtttacctttcttgttttcagagatgaggatttctgatgtatagtaggtctcattcaggtttctggcaggaggaggcagccaggcagaatgtgatctttggtgttaaacttgggttcagttccatcccattcacttactggctgggtgttcttgggcatgggttttaacctctgtgagctgacttgagttttgtcatctgacaatgagggcggttataaaaattaaatgaatataggaatataaataggcacaaaacaaagaatagcttttattatatataccgggcagtgttctccaggtctatataatgacttgtaaatcaaccagcagacactaatgatgtctactttctattgagctctgtagaggcttataaaacaaaggtaaatgtgggccaggcacggtggctcacgcctgtaatcccagcactttgggaggccaaggcaggtggatcacaaggtgaggagattgagaccatcctggctaacgcggtgaaaccccgtctctactaaaaatacaaaaaattagccaggtgtggtggcgggcgtctgtagtcccagctactcggctgtagtcccagcaactcgggaggctgaggcaggagaatggcatgaacccaggaggcggagcttgcagtgagccaagatggcgccactgcactccagcccaggcgacagtgtgagaccccgtctcaagaaacaaacaaacaacaacaacaaaaaacaaaggtaatgtgtctatgctaagagactctgggtgggtagcaagagagctaacacataggtaattagaaaacagggacaacatgcaatttccaagtttcattaacagaattaaaggatgacaagaaattcaggggctagagtgatgcaggaaggcctcaaaaatggagaggaggaagggagggtaagcatttgccaggagagaggaaggcaggaacatttggctccggtgtctgaaggctgttagctccttccttgctgggccctggcacaacacctttgaccttgcagcgcactcccaaacatgcaggtgtgcttgtcctgaggtttattttgggggtggttttcattctggccttgttttccctctgctgccaataatatttctgaaacatctgaaattgttttattttatactcgatcaaaaatattaagaggcaattgggtggccagagtgaaagcccagaggcccgtagaagacttttgggtttctggggctttgtgttctcttttcatgcctcatatattgtagctcacttcctagttctggaatcacagggtgttaggactaagggtcaggtccacttgacctttgcattggactgaagaggaaactctggcctaagatgccaagtggtggctgggcaccgtggttcacgcttgtaatcccagcactttgggaggccaaggcgggtggatcacctgaggtcagggttcaggaccagcctgaccaacgtggtgaaaccccatctctactaaaaatcccaaaattatccaggtgtgatggcagcctcctgtaatcccagctactcgggaggctggggcaagagaatcacttgaacccaggagcagaggttgcagtgagctgagatcataccactgcactccagcctaggcaacaagagcaagacttcgtctaaaaaaaaaatccaagtagtagagccagcatcagccagagttctcatcactacctatcctggtggaggatggtgatggcataggaaggtgaacggcctgacataggcaggaagaatggatacacattggttccctcatctgcccacctgcttctctagagtcctttaaggctgtcctctttagtctgagggtccaatggggagcaggagtgaatgtcctacctttatctggcctgtgatcactgccatctgtctgcttcagggcccctggataccgagtgctgttcccctttcctggggtcagactacatggaatgtcatctgaggctgtgggaaacaccaggaagatgccccgggtttgggggctagcttcagcactgtcttctgctatgtgacgtggtatctccaggtctcagattgtgcacctttaaatggacagagaagcccttctctactcatctgatgaggctgtaggcagatgaacacgtgcttggcaacctgtgcttgtgctgtggtcgtaagggtagtgtcctgctaggcactgtgctcctggaggtcaccagctgtggttcatcttgtatccttactcatagcctggtgcctgacacaccacaggtgctcagtacatctgggtggaaggactggctaatggggtaaatggaggtgctcagagaagattctaagggatttgctgtgtgccactccatgagaaggcactttccactcattcacctcacttcttcagttatgtcttctgtagggctaggtatacttcattctaacttttctcctgagctttatgcatctttccagccaagtactgagtccattcacagaacatgactcaagcagatgtattcctaaacttccccattgtccaagttaaatttccatttggtattttcctattagtgtcaacagggtgatcattttcgtaatcacttggttgctgatcttgtggaaacgagtatgttcatgaggaagcagcaggtggctttagaacgtgcctggaggaacagttcttatcttgcaacctgcctctgattactatcaaaagctcctgcctttccaatagtcactcatggtatacatgatacaatcaacgcagttgctactgatgttacccaatagtatgttttagggagttctcaggcttcttattgtgattgggcaggcacctagggactcagctcctcccctgtgggcctgctgattatcccaggcagagaaacacttggttttactttgatattactattttttcctgaccagaccgtactagctcacacttggagtattaactgtggcttctctgtagcccaaatacatcgtacacttgattgctttgttgatctaaaacatagtctgactgtgtcaccaccttcaggaacccccggtggctccctgtttcacacagaacagccttaagccattcacaggcctctataatctgacctccaagcccagtctcatagcagccacccccacactccttgatcccactacaaccagacttcttgtctcagcccaattgatactttcctgtgtctctgactgtgactgtgagttcatcctcacctggaatattcttcacttgtctgtttgattgacaggttcttctatccttaaacatttgttcagggaatgagttaagttcctaataactgtcagatactgcccccagaggctgcctctgaccttttcagcctcaacttctctagaaataagtccctgtaaaattctttttacagagacaagtcataaattattatggtatgtttttatcatttgtttaatttttctcatgctaaaattttatatctgtaactatactgaaaaaacatcaagggaaggacatgttaatgcctctgtttcctcatagcagtggttccagaactggctgataacaaaatctctttgggaaccttgtttgaaaaataatctatggctccccagtcccagcccagactaccttggtggggtcagggaatctctggtttaacaaagctttccagatgtttgtgatgtcaacctgatttgatgtttcactatgtaattgtttctattatttctttgatttgtgtattaggaaggattcttcaaaattaacagaaaccaattcgggccagctgaagagaaaaaataaaggtaatagcatgataaaagatggattcttatattttctttattccaaattatagccactaagattcgtatcactttatagtttctcaggaaaaagcacttcctttcatatagacaattttagaaaagtttctaaattacaatataccttaatttttgaaattgcataccagttttttcatcattataatcaaaatataaagatccttctgaactatgataatgtgataactgatataatctatcagagttacatatgatttcaaggtgaaatgctgtttttcataatctgtgttcatgatttttgaatgttgatgcattcttgccttcctggaataaacacttagtcataatgtatagtttttttaaaaaaaaaataccccagtgactttgattttctaatattttattttggttttttacatctgtagtcctaagtgagattgaactattaattgtctttgcttcccttggccagttttgtatgtgcccacaattttgacatttttggcacctttaggattgacagaataagtctgaggaatattaaagtctaccagggttttgtctatgtattctttagattaaattttgagttctagcttttctataagtaatattgctaaaagttagatatctttttctaaaagttaactggaaactttgaaaaaaataaatattcagtatctacctgatcatctgttgcacataaatcagtcacaccaacttttcctagtttcggtgtattctggtctggtaaatttggcagtttctactgtctttttattccattgtttgacaaatgatcagcattttcccaggtacacaataacttttcttttcaatgctgcatcataataggtttttttgaagactctttttctttctcatgtaaaaaagtagatataatttatatacagtaaaattcacctgttttaatgtacaattctgaacaattaatacataattatgaggaagttcagttctgaattttgacaaatgtatatatagtcatataggcaccatcacaattgagatacagaagagctccatcacctcccagaattgccttgtgagcttttgttgtctgctctcccaccatgcagaccttggcagttactgatctgctttctctccctgtgttctttcctatctcggaatgtcatataaatggagtcatggtttgtaggctttttagtgtgcctgctttcacttagcattaatgtgttggagattcatccatggtggtgggtatatcaataggttattcgtttttgttgctgagtattatttcattgtaaagacgtatcaccgtgtgtttacctattccccagttgaaggacatttgggctgtttccagtttgaggtgataatgaacaactcactatcaatgtttgtgaacagatttttaggtgaacatagatttcatttcacttgggtaaatatctaggattggggtttctgggaggtatggtaaatgtaatggaataccaaactgttttccaaagtggctgtaccattttgcattcctggtagtaatatatgagggttatattttccacatctttgtcagtacttggtattgtcagattttaaaaattttagacattctaataggtatagttttatcatattgtgtttttaatttgaatttccttagtgactactgatgttgaacatctttgtacttatttgccaaacatatattgtctttggtgaagtatctgtttaagtcttttgcccaagttttattggattgtttgtttccttatgatttagatttgagagctctttatatattctggacattaatcttttattgggtacgtgtttggcaaatattttctcgctgcctgtagcttgtcttctcattctctttaacaatgcctgttactgcatgacagaagtctttaattgtgatgaaattcaatttatcaatttttaaagatgtgttatgcttttgctgttatatctaagaaatactaacctaatgtggagtcattaagattttctccagtgctttcttcaagacgttttacatttttaggttgtatatttagttctgatccattttaagttaatttttatacatgatgtaaggtatagatagagattctgttgtgcatatgaatgtccaatagtgctagcaccacaatgaaaagattatccttctcttattgaattgtgtttgtacctttgttgaaaatcagttgagcatgtatgtgtggtctattctgagtattctgtcccattgatttatgtgtttattctttcaacaataccacactgtattgattattgtagctttattgtaagttttgaagtaaggaaatttgagcccttcaacttagttctttcttttcaaaatagttttggctattacagattttttggcctgacatataaattttagaatcatcttgttggcatctgcataaattcctgatggaagtctgttggtattgcattgaatctataagtcaatttggagagaattgacatcttaacaatgttggatttttaagtacataaataaactatatttctccatttaggtcatctttgatttccttatcaatattttatagtttttggcatatacatattgaacatattttgtcatgtttatagctatgtatttcatgttttggtgtaatttttaatggtacttttagtaaaattctgttttccaattgttcattgctagtatttataactacaattgatttagtattttaatggatttttaaaaatttaaatcagaataaagtacagcaaaatgtgtacttgcagagtttgaaaatctaatgtgattagtagctagctaaatctaatgtgtaacttaaacaatttaaaaggctgggatatagaatcaattttcagccctcatctgctcttaactatttccctgagctttttaattatttttaagcaactgatttttgtttgttgaccttatatcttttgacttttctaaactgacttattagttctagtagcttttttttctagattctttgagattttcatcatagataatcatgtcatctctgaataaagatagttttatttattcaattccaatttctttgcctttattttacttgttttattgtgctggttaagatttccagtataatgttaaacaggagtggtgaaaacagacatcattgccttgtttccaatcttaggaggcaggtgttgagtcttctatcatcttgtatgatattagtcataggttttttgtagatactttttatcaggttgaggaagtttccttttaatttgcttagattttctttgtctttaccgtgaatgaataatgatttgttcaggcgctttttacggatctgttgagatgatcatattttttcttttgtccatgagttggcaaactttttcacaaagggcagtgtgagaaaaataataaatatatatttggtctttattttcagtttctggcatagagcttctaaaaccctgggagtttcctgagtgagagtggtgagaggaatgtctttggttattcataataagtccctttcaaccatacctgagtttatgctggtgaggtgacacttggtgagcccctatatagcttcaggatgggggctgattgtcagaggaaacaaccatgtaattagaaggttggaattttcagcacaccctgccctaacatctggggaggggagaagggctgaaaactgagtaaatcattaatggccagtgatttaatcagtgattcctatgtaacggaacctccataaaaactcctaatcaaaggggtttggagagctttggaattgactaagcacactgagatgctggcaaggtgctggcaatgcctggagagggcatggaagttccctgctccttttcacataccttgtcctatgtatctcttccatttggctgttcctagattgtatcctgtaaaataaactggcaaatataaggaaagagggctctcaagttctgtaaaccagtctaacaaattatcaaacccaagaagggggtcatgggaatccctaacttatcgtcggttggtcagaaataagaggggcccaggacttgtgatctgaaatgggggcagtcttggggactgagcccttaagctgtaggatctaacactaaggttagatctaactcaaggttgatagtgttagcattgaattggattgtaagacgcagctggtgtctagagagagattcagttggtatgaggaaaaaaactccacatagctgggtgtcagaagtgttctgggagttaaaaacaggtcataatagccagataacaaatattttaggctttgtgggccataaggtactttattcaactctctactcaactctcataaatctcctctactcagtgattcagctctgccattgcagcatgaaagcggccacagacaatagatggataagtgaatggatgtggctgtgttccaggaagctgtatttacaaaaacaggctgcaggttggatttggcctgctggtcatagttttcccagtcatagtttgctgatccttgctttagtctattgatatgtggaattacagtaattgattttcaaatgtttaaccagccttacattcccagaataaactccacttgtggtatattattaatctttttatatattgctggatttggtttactcaatttcattgaagttttttgtgtctatattcatgaaggatattgatccgatgtctttgtctggttttggtgtcagggtatattggtagccttatgagttggaaagtgttccttcttctattttctggaagagtttgcataaaactgttgttatttattcctgaaagttttagtagaatttgccagtgacacctgagcctgaagttgttttgcggcatgattttcaacagcaaattaaattatttaataaatataggactgtccaggttatttgtttcttcttgagtgattttcggtagtttgtatctttgggataatttgtctatttaatctaaaagacagaatatttataaatgttcataatattaacttattatccttttaatttctttaggaattgtagtaatgtctcattttctattcctgatatttatagtttgtatcttctcttttgctcttggtcaatctggctagcagtttgtgaattttattggttctttcaaagaaccaggtgtttgttggtttgagttttctcaatgttttttgtttccagattcattggtttttctttatcatatattctgcttgttttgggttcagttgctcttccttttctagtttgctaaagtgaatgcttagatcattgatttgagacctttcttcttttctgataatttctagggttctccttttctgggacagttgggttgggaaaggggacatggaggtgtagaaccagttttcctacctctaagcatttattaggagagctttagtaaaagccttaccagcagggagccctgaggcttctgcttgggggtgggaccaatgggaaggaggcgaacggtcacaccatggactgtttctttcatgggaagcagtggcctggtcttcccaccctgacagtctaggaccctaatgctcatctgcctcccaatatggtctgtagaaaggagaggaaagggagttggagttcctgcagttttgttggatgaaagggttctctcctaatagtttagaccaggagctggtggactttttctgtaaagaggcagatacagatagaaaatattttcaactttgcaggctataccatctctgtcacaggtattcatctctgccattggagcacggaaggagctgtagataacatgtaaatgaatgggcatggatgtgtttcagtaaacctggtttacaaaaatagacaacaagctggatttggcccatgggccatagtttgcctacacctacctgctttagtctactaatgtggtgaattacattgattgattttcaactgttccagacaagttgtattcttgagataaattccacttggtttagagcatctggtctgtgctggccctgtctttgtttctcagcttgcattgtcactgagccatgagcttctcaggggtagggccacaatagggccatctctgatctcctgtcaggtatatggtagatggctagtgaacctttgtggctgggtggaaacacctgtgcccttcagtggtactctgctgcagcttcctttttggtccccccaggagcctagaagaaacggaggttgggtggaggagttgggctcaagtgctgtcactgcaggccccaggctgatctttcattttgagactcttttagaaatgtgactcatgtttggtctgtgaggcattgctttctaattactctctgtcctttttctgggggatgtggttggcaccatagctggcaggctcaggaattcaggcctccaggtgccagcccagtgctggtgttctaaaagggcttgattgacccctttccaggaccatggctttctagatccttttatagaagagtgtgcctgtgtgtgggaaggggcagagcaggagggtccatgcccttctggctcctaagtgaccttcatgcctgtggagtgtggactagatagagccatgtgacaaggcattacaaatggattttgcacaggtagatttcatcgtccatcttagccaattttcctaattgattgggagggctgggtgggcagttgatgggaaggtcctggagctaacagacctgggtttcaatcccagctcaagaacttattagatgggtgaatctgggcacattatttaactactctgaacttcagttcactcccttataaaatggagatgtaacaacttcccagaattgttgtgaggggtatgttaagtccctcactttctctcctgggctgacagaggtgagcagagtggtggacaacagaagtgcaaaacgacttgaaaacatgggagaatccatttgcagactgggatatggagagggtgtgctggtccccttttcctgcctagaatatttcagagctgaaagatggggaggggtgattcaagggccaagcctctgattctgctctggagcaagaccaccctaggtctggatgatgccttaggttgtttgggcctcttgtctttcattgttcagccaggttcactgggataggaacctggagctgtgccagtcctggtttagaggaattagttgcataattgccttggatttaatgggaaaatttaaggcctcttggacctgttgataataataaccctccttatgactacccagtgtgggaggagtgaggagagtcacctccaactgccttcagaacaccaccaccttttcatgtgttctgaggtttctgctttcctcttgacaaggttcaagacccttttgcacacgtgttaggggatgaggaccctgctttcctgcagagtctgtgagttaagggcactacagctcctaggccgccctgctcaccccagactgaggcctcattgccttctgggacaatcagaccaaggcttttactggagagctcataaaacttgttaaggatcaagaactagataaagttccaattttgtcaccctgagataatcttgtattattgtacctgaaaacagtattgaaacacagatctcattgtgacacccctggttaaaaacaatgttaatcccctgctacctaaaagacaaaatttcagctattcaacgtggcatgtaaaataggctgcaattaggcctgccacataaaatattcagttattattttgctataaatacttctcatttggataatgttttacagtttatttgtacattttgcatttaatctttgtcaatcttatgatattgttcttgttcccactttgtagttgatggcccaaagtttagggaagttaaaaggaatttgtccaagatcaggtggccacaataaagtcaaactaagcacagggtataaattagtgctcacttgctacttcctcactgtatgaccttgaacaagtttatttatctataaagaatcagggataatacaacaaacttgtaaagtttttgtgaggattagatgagagaatccaagcaaagtgcttgggggaatgcctggcacatagtaagtgctcagaaaatgttgggtattattacgatactctattttaattgttccacaattaatgttttcagtttttaattccactattataagtaacactgttataatgatctttgtccaaatagtttattttttctgttgtattatttccttggattatattccaagaaaagcattgctaggtcaaaagatacgatcctctttttttgcctttgttccatattgccaactagccctttagaaggatggttcccatttaaaaggctgctactagacccatgagagtgaactctctcccactggtggtacttctgtgcaacctctcagcccatcagagggcatataccagtcatttatcagtcattgaggattataattatcacctttcaaaaagaccaacagatcctagactggttggagccaaactttataaactaggttgtgcctacagcaagacataggacccggctaatcagcaaactgtactaaaaactctaggaatggctgacctctcaactcactttctgtagggctctgtgggagtctttgcatgtacacagcaggtagataagaaggagtggtgttgggggaggcaggagttgcttatgagctgtggacctgaggactgtagggaggaagactgtatgggaaccatgtgtggcttcagactttttatgtaggagagtgtatgcatttgtttgggttgtgtaacaaagtaccacagccaggtggctcaaaacaatggaaattcattttctcacagctccagaggctggaagtctgaaatcaggggttcaaacagagtcaagctttcctctgaaggttctgggaggatccttccttgactcttctggcttctagtggctgccagcagtccttggcattccttgggtgcatgtgtatcactccagtctctgcatccatcttcacatggacttctcccctctgtgtcagtgtatgttcacatgatgtcctcctctctgtgtgtctgcgtccaatgcatccaaatttcctcctggtttttttttttttttttttggatactagtcattggattaaatcccatcctaattcagtatgacttcatcttaacctgattatatctgcaaataccctatttccaaaccaggccacattcacaggtaccagaggttaggacttcaataagatttttggggggacacacttcaacccatgacagatggattgggaagagaaaatggaacatgtccatttttcatatcacagactacaccgtggatggggctgttggtggagaaaattatggacagtggtagtgtcactggtgggaatgctggacagttgtctggggccagtgctgcttctgttcttggcctccccagccccacttaccctaaggatttgtcacaaaactagtcactgataagtattaggtgcttctagctgggatgatgcagccatagcagaaagagcttagccaccgagggaaaggggtgttctaggagccagtggggagtcatagaaataacgggactgggcagacatgcagatctcaggttaagtctcaggctacctggaacaccatggcctcagtttccccattgaagggtgaggagggagggactgcatagcttctgacgtccctttctgtttggcattatataattctaacaggagaggtaacattttagagacacccaagctccttgactctaagggttgtcctgaggtctgtctgggtgacgaggtgtgagcagctgatatgggtgggtactggggaggggacaatgtggtattttccatcccaggtctttccaacaagactttattcaagtcacctctccatgaggcctttcctggcctctctaaaatttcaacctcatcctgatatttcatgtcccctctttcagttttaatttttctccttatacttatcccctatccaacatggtttacattttatgtattttcctcactaattgtctgtttttcccactaaacagtaagctccttgagggcaaggatttttatccaattctaaaataatgcctatcacataccaggcactccatacgtatttgttgaataaatgaagatgtggtaaacttgataaattgggtgaaaatttaaagggggtgtaccagttatattctttgaaaggtctcaatcctccctggctccagccccctagccaagactgcccagggtcctgccataagtagcacctatttctgcagggtttgttccagtcatcaattgctgggagaaaactctcccaaacagtggcataagacaacaatcattttgttatgctctggggttctgtgggtcaggaatttgaacaggacacagtgggaatggcttgtgaagacctgaaaagctgaggtgactcaaacagctaggggcttggatcatttggaggcttcttcacttaccacctggcttctagactgagacaacttgaaggctgggctcagctgggatacctggagccagagtgcctacatatggcctctccatgtggcttgggcttcctcacagcatggtggctgggtttctggagcaagtgttcccagaaggagcattccatgagagccaggtgaagactccctggtcttttattacctggcctcagaagtcacatagtgttgctttttgccgtactctgttgatcaaagcagccataagcctgcaccttggtaggaggagtgtcaaagattttgagaccatgttttaaaactgccacaagaatcttaccactttctcaccggtctcaatctaaagttaacctgaagtaaaaatctgccaccttcagatcaggacttatggtgaattatacctgttctctacctcactcttcactaatggagcttcttcaggacagagtctgccatgtttgttttttgaagcacctagcacattatctggcacacaataagtactaagcaagttagcaagcaagtgaatgaatgcacgaacacagggaatgggtgttttctgtggctggcttagcactgctaagtagctacaggaagacttgaaactcctgtctattaaggccaaagttttctaaccagtttccattcatattcttcactgctgaaagctgtgggttaggaatagattcctgtggaagagacatgagtatggagatagaagttgtatggtatgttagggaatactggtaatctggtttgatgatagctaataatttctgtattttcctaggacaatggcagaataaggctagaatgtaagggccttgttacaggacactgagtatggatattattcattaatgaagagtcatcaaatattgttgagcagcagagtacatgtaataggagctgtgaactaggaagattgacttgccagtgacattcaaaccagattggagtagggaaccccacagataggcaaaacagagatttgaaatccaggtatgtaaccagggcctgaaccaagctagaaactgcaggaaagccagcaaggggagggatgtgagtgattgtgaggttagcaggtgtttgggcccatgtgagaggtgacaaaaaagagaatgtaaaagatgatgcaacaatcacatatatgtagagatggagtctgtcactcaagctagagtgcagtggttgcagtctcgaactcctgggctcaaacgatcctcctgcttttagcttcccgagtagctggagctacaggcacatgccaccgtgcctggctaatttttttactttttgtaaagacaggatctcactatgttgcccaggctggtctcaagctcctggcctcaagcaatcctcctgtctcagcctcccaaagcaccaggaacactcttactttgtagggactaatttctataattttgttataaaaattttcaagtatacagcaaagtttaaacacatgtatggtgaatacatatattccctccacctagattctaaagttaacattttcctgtatttgttttatcacctatctgtccatccttccatcgtcaatcagtccatcttgtttttgtgatatgtttaagtcacagacattaggaaattgtacattcccctaaatacttaagcatgcataccattaccttgagttgaatattgtttacgttattttttcttttgaggtaaaacttatttatagtgaaatgaacaaatcttaagcataccattggatgactttggacaaaagcatgcacctgtgaaacccaaacccctttcaagatttggacattaccatcatcctacagaattcctttgtatttctttccaatttctgtccccaccctccagatgcaaccattattctaatatttaaggcacagatttgttttgtctctcctagaacttcacataaatgaaattgtatggtatatattctttggcttaatgtttctttcatttggcctgtttttgagatttatccatgttgttttgtgtatcagtccgttccttttaattgctaaagagtattttgtttatggctataccacagtttacttatcccatttccagtttttggaaaaaaagttgtttccagtttggctattatgaataaagctgctatgaatatttttgtataggtctttttgggtagacatatgttttcatttctcttgggtaaatatctaggagtggaattgctaggtcataagatgagtctatgtttagttttgtaagaaactgccaaagtgtctgtttccacatttatacacctatatttccaatgtatcagaatctagttgcttcacatcgtcatcaacatttggtattgtcagtctttttaattctagtcattcttgtggatactgctatggcagtatcctattatagttgtaatttgcatttccctaataattaaggatattaagcgctattatgtgcctattggccatttatgtatctttctttttgaaatattattcaagtattttgcccatttaaaaatttgaattgtctttttattgttgagttgtaggaattttttattctgaataccagttctttatcagatacgtgatttgcaaacatgtttttctaatttgtagcttgcctattcattttctttcttagagcagaagttttacctttttttttttttttttttggcaaggctatttttttttctgtgtccaaagaaacttttaccacccccaaaattaccaagataatcaccattttctcatctagaagctttataactatagtttttatgtttaggtttgtcatccatctcaaattaatttttgtgtatagtgtgaagtagggatcaagatttcttttttgcccctgtggatatccgttgttctagccccatttgttgcaaaaacaccttcctttttgttaggtactgtttttattctcttgcagaggaagaaactgagacagagctaggttaagtaaccacacctggcagagacagatccaggatttgaacccaggcagtctggatgcagagcccgtatttaaaccactgtgttataataacccttcttacgtggatgacaggttttcaacgtgagtgcaggcagctcagtgtaaagccctggtagggaattcaggaagcaggggagttcagtttgggattgagctggggagcccatgggatacctgagtgggcacagtggggagaagatagaaaaaagacggaaaaacttggaagaacaagtaggggagaagggaggtgggggctgctgaaaggggatgttattaagcctaacctggatttcaccttttttatttagcatcaggggattggttctctgtcatatcaatcctggtctagaagagtcatgaaataggcaagatacagctagtctaaatcttttgaatttaggtagtaagggtgacatgagcaagagtcataaagccagagaagataaatagattaagtagaggtagggaaagtcagcaagcatcatgtttaggatgcctactctctgttagacagacctggcttcaggtcttcatccaggccttgcagctcactctgtgatctcaggcaagttacttcatttctgtgcctcatttttcctcatctgtaaaacagagataacaccaacctcactgaattaaaatagacaatggatttaaggcacttagaatagtagctcaataatggtgtgtcagctattttaagattcagtattttaagaatgtggtcaaggcccagaaatatagtagaccctcaggaaaacttgctgaatacacagatgaactacagggacacaggattctccagtttaaattgtgtaactgcatagttttagcacagatggccatgaagttacagtaagaagctaggaccatgagctgagctggtctctaaatactcaaggtggtgcaggaggcagcccagactggtgacgctgagccagcatggccttagagccttccttaggaagggcactgactgctggctcggattccaatggagcccccacgggcctggagctctggagtgggcagggaaggtgcttctgctctgagtgaacagagagctccctgacagcaagcatgaggatactcctgcctgcggaaggggtgacacctcaagtgtattgttgcccagatggcccacagaaacccatgtctatccctggttttgatgactatgtcctgatctagccccacttctagaaaagcccatttaaatggagtttgtaggattgacattttgagtccagtccactctccatataggcaggaagcagagtcaattaagtacttgtcaagtacctgctggggtacctgttgagactctgtgctggattaggacacttgttttcctgcccaccgggagctcaatgtagttagtgaatgacacacttaaagaggtatgtggtatatgccagatgtaaatggccaaagacagcttgggcagagtcatatggataaatgctttctacaagggttgttacactaatgctagacattcaggccctctggcgtctactccagctccagtaccttctcccttccaacagtaataactgatatttgagtgttcactgtgagggcagcactttagagctgttaactaaggttctccttatgatgaccccatgaggggagctctgttagtacctctgtatttaagatgagggatctgaaggacagacacctacaggcttctacaggcgcattgctggtgagcgatggtgctgggtgtgaacccagctgtctcgctgcagagcttatcttggtaggccctcggggctgcttggctagtttctttttcaaatatagagcaggaaggaggatgattgacattttctttcatgatctcaacatgcaatcacacagtgtccaatcagttttttttttttgttttttgttttttttttgagacagggtctcgctctatcgcccaggctagagtgcagtggtgccatctcagctaactgcaggctccgcctcccgggttcactcctttctcctacctcagcctcccaagtagctgagaccacaggcgcccgccaccatgcccggctaattttttgtatttttagtagagacggggtttcaccgttttagccaggatggtctcaatctcctgacttcgtgatcctccctcctcagctttccaaagtgctgggattacaggtgtaagccactgtgcccggcctgtgtctaaccagtttttacctaaatatggccccctatgcattttactctgacactggctcagctaaaatattcttaatttcagaagaagaagcaacaagacagaactactgtgtttattgaccaatttaggctgtctcagggcacagctctgaggatgggagcacactgagtactttaacgatccacggcaaggtgacagcatcttgggctcagacacaagaattattctcagacagggcttttttcagtgccataaatttaagcagctggaattcttttccatcctattcaacctcctgaagtgaagaattttgccttttattgggaaatctgcatttcattgtatagctagaacactatgtccttggctccctgatcctctagagaaggtgggtctttattttattccaggttctgggtgtcgttaggctcaaataccaaaaagtctctttcagcatgagaagctagagacacagcagtgccctgatcaaagaattcgagcagccagctgtccaccccagtgcaacgcaggccttgtacacagggtgtagggaagaactgcaggtctaggagacagtgatgctggttgctcagcatcatggctccccctacacctctggtctggagccgtgtgccgggcctgccagggcgtgagcactgctctgctgtctgcagaatcaaaggagggtattttaaccagcataacagaaggcatcatcccagtcactgatgtccttcaaaataaccttcttcagaaagtatatacttatgctagtgatgatgccattgctcagaatgtttttggaatttcacttttagaattgtgtttagtttagaatcatgcctttttccttccttctgagggggagttttttttttttctaactgcgtctgaaaatattaaagaatccatcacttaaaaatttatatatgtatctgttttttttgtatctgttacctaaaggggaaattactggcagcaatttgatccccacacgttaccagaaacagataccagtcatttaaactttcgtgaacctcatgggtaatacacgctatctcattgttaatttgtgcttaccactactgaggttggacatgtttccatgtattttggctatttgtgaattgtttgttcttgtccttggctcatttttctattaaacgatttgtcttttactccttgagctatagaagctcttcatatgatagtggtatatggacagttcttttaatatcttgtgttgtgacacagcttcatcttttgaacataaattagatttttggaaatgcatggcttgtgactgattaagtcaggctaaagtgacttcagcaatgttatttcagtacccatgtctggaaggacttaaacttgtcacggacttggagtcagatgtaatcaggaatagacagactgtgttggaggtgtgattaggatgagtaattgactagttgagaagctgatgaaaacttcatgtatacatacctaaaacattttaacttaaaacatataatgttaaacatttagttgccaaactttcaccatgggacccaactgggtttacaaatgggagcctatgttatcttacttgtttgctctatgcctgtaaggcattttctgcacattccagtttgaatctttttagtgtagaatggaatttaggcactttgaaagccattagaatgcagaactcttttagtttttataatttttccctgttttttacagttgtcccatccaaacctaattcaatagtaatttttttaacaattcatttctatcatttaactttcacagaaacagatcttttatattcacatttaatcactttatatactatttaaattatatgtaaatttagtgtttcaatttcaataataaatacaatgggcataaccggttttagggacaagccagctgactcttcgtaagcacacagctctcctggatgaagccagtttggtaggaagagagctgttaatatgagtgaacagatacattttagtgaaaggaggctgctatgttttggacgtccgctccaaaactcatgttgaaactgggtccccagtgtgtcagtgttgagaggtggggcctttggtgggggtgattaggtcatgtgggctctgccttcatgaatggataaatccattcatggattaatggattaataggttaatgaatagattaatccattcacagattaatgtgttaatggattaatggctatcaagggaggagaactggtggtgttataagaagaggaagagagccttgagctagcatggtcagcatactgcactgcctcaggaatcttaagagtccccaccagcaggaaggttcttaccagatgtagcctctcgaccttgtacttctcagcctctgtaattgtaagaaatacatttctttcttactccttagtttctggtattctgttataagcaacagaaaatggactaagaggcctatggctatctcaggctgtctggggacctaagagacaaagggaatgggtgaaaggttagaatcacatttctggagaacctagtcctattttcctttccttagtactttgagacctctcccactctggagacctctcagttctcccaagctgcactccacatttttctgtctatgaaaccatcttcaggtccaaggacaataccacaggatctgggcactattgcaagtgataaacataagcatgacaagcagatagctcccaagagcctctgtagcaggagcagcagcaagaaaactaccaacccttagggcactgaagatggcccagaatccaataccagcgggtacccaaaagtcctttgtccttcggtttacattatgcccgtggctgagagtcatcaggccataggccccaagtgcaagtgggagggttgaagtgcaagggaaaattaatatatacaggccagggtgacaggcccagtgtaggctattaggctggatttgccccaggattgaaaacttagttagggccatagcccatgacacacaattttttttttcttttttctttctttctttattattattatactttaagttttagggtacatgtgtacaatgtgcaggttagttacatatgtatacatgtgccatgctggtgcactgcacccactaactcgtcatctagcattaggtatatctcccaatgctatccctcccccctcccccgaccccacaacagtccccagagtgtgatgttccccttcctgtgtccatgtgttctcattgttcaattcccacctatgagtgagaatatgcggtgtttggttttttgttcttacgatagtttactgagaatgatgatttccaatttcatccatgtccctgcaaaggacatgaactcattattttttatggctgcatagtattccatggtgtatatgtgccacattttcttaatccagtctatcattgttggacatttgggttggttccaagtctttgctattgtgaatagagccgcaataaacatacgtgtgcatgtgtctttatagcagcatgatttatagtcctttgggtatatacccagtaatgggatgactgggtcaaatggtatttctagttctagatccttgaggaatcgccacactgacttccacaatggttgaactagtttacagtcccaccaacagcgtaaaagtgttcctatttctccacatcctctccagcacctgttgtttcctgactttttaatgatcgccattctaactggtgtgagatggtatctcattgtggttttgatttgcatttctctgatggccagtgatggtgagcattttctcatgtgttttttggctgcataaatgtcttcttttgagaaatgtctgttcatgtccttcgcccactttttgatggggttgtttgtttttttcttgtaaatttgtttgagttcattgtagattctggatattagccctttgtcagatgagtaggttgcgaaaattttatcccattttgtaggttgcttgttcactctgatggtagtttcttttgctgtgcagaaactctttagtttaattagatcctatttgtcaattttgcacaatttttttttataccaaagatcaggtgtcctcagtttgcaatatggaaacaatttgggtttgggagtcatatgtgaattcaagtccagcctgtgtaacactttgagaaatcactgaacttctctgagcctgtttcctatattgaaaaatgaagataacattgccctggtttgtatgagtagctgatgtgaagattaggaacgtatataaaatgcactgtaatacataaagaaggtccccattaaataaaggctgttattattaagaggtactcaataaatatttgaatggataatatagttaaatggaaaactggctgtgttagggttgacttggcaaaagcaaaaccaaaaagaagcacacatgtgaaataacccctgttgttaggtggttagcattgagatttatgtgcctcattcaacctggtaccctggtgagaccaattctgggcagttcccagtgtatgcacaaacgagagggttgtagtggtgtgttacagaggaaaatgttccaattgggaaccaactttctccttccacactcacaggcaacaaagcgttcctttccaggtaaagaggaagaaaaactactgaagtgtcatagattctccatttgttgattccaaactaggtgttgtccctttatatttccagtaactgagtaaggataacatcacaaacactggggactcaggtgcccaggccccagtgtaccaagttctgttctggaaagaatagacttgcagttttgagatataaacaaattgcagtattcactgtttcctctttcatctcactctttctacctgaaatgtttacactcgaatgagtggaaaagattatattagtctttaaaattcctgacaaagtcctctgctctaggtggcttgatcagtgaaagctttggtgtaaaagcagaaggtcccaaatctctagggcaggtagtggtggcaaaaagcaggatcggggtctatttgctttggttaccatgcttgtcttttggagtgagaggctttggcaaagtgatgatgcttctggggcaccagttaggaatggttggcattcacagatgatctccttctcctttttaaaaattttaattttgtttttatttttttaatttcttgtatttatttttttaaggacagggtctcactctatcaccaaggctagagcagagtagcacaatcataactcactgtagcctccaactcctgggcttaagcaaacctcccacctcaacctcctgagtagctagaactacaggctcatgctccagcctgggtgacaggatgaggcctcatctcttaaaaaaaataataaacaatgagatcaggtatatataaaaacatatataaatgaaaaatatagttattgaaataagatgcaatagatgggatacactggagactggttaccattgaagcatgagttaacagattggaaaatagtacggagaagtttagcctggctgcggcacagaaatataaagatgtcaaaaacatgaaagaacggtttaaaggtatggaaggtaaatgacaggcttcaacattatttaataaaagctacagaaagagatttaaaaagggaatggaagtgaagcaatatttaaataaatgattaataattttccagaattgagtaacaacatgagttctcagaacaaaagtgtctcctaatactttgaaagctaaacaaaagttaacccgcaattagacatagtgaaactgcagaaactgctttttatttctcttcagaaaagagaaaaaagagcaacttaaaaatccaaaataaaaatacaagttatgtataaataaatgacagactgacaggtatttcatcagcaacaagagaggtaagaagacagaggagtaacttttctgtgttgaccctaaaatactatacctagataaactatcccaggagaatgagagcaaaacaaagaccaagaatataaatacaaagatgctcactgaaataactattaaaggatatattttgagtgtttgtttctttttaattcccatttctattttagattcagtgggtacacgtgcaaattacaagaatatattgtgagatgctaaggtttgggcttctattgatcccatcacccacagataggaaacactgtatccaataggaggtttttcagcccttgcccctccccctccttttggagtcaccagtgtctattgttcccataaaggatatgttttggaaagaaaaaattaaacagtgagaaaatatgtacaatgtaagaggcaatggtaaacatagaaattgataaaatatatttatatttatttgttagctatgcaaaaaattcataagtgtgtatggtttgaaaaacatgattaaaatgaagactaggcaacaatagcaagatggtgcagattttttgggggaaaatgttaaagccatattcagagtcaggaagataataattatagattttttaagaaaaaactatagtcatcaattgtacccagagggttaggctacattactaaactcagtggcccaaaataaacattatcttatttagcttccaattctttgggttggttgggcaatttttaaatctgggccagctcagcagatcttgattggactctatcatgcctctatggtcagccggcgactagatgatctaggatagcctcactcacatgtctggaagttgactgtctgatccttggatgtcttagttctcttccaaattgcttctcatcttccagcaggctaccttggggtattcacatggtagacccaggtttccaaatgcagcaagagagaagcatttaactgtccaaaaactttttaagcctctgcttatgttatatgtgctaatgtcctgttagtcaaagcatgtcacattgccaagcctggattcaatggggagagaaatagactccacatcttgacagaagtaaaataatttatgggtgtttttggaatctatcagagtctgctctttggcctcatttctcatgcatgcaaaatatgctcatccttatcctaagctctctgtcttatttatagcatcaggttggaagtctatgatctcatgattttatcacattcagatatgaaagagggtcctcagctgtagctccttgggtacggcagctcttgatccagaatttaaaatgacaagtcacctgctccctacacctccatcatatagtggtgagacgggcaggataactggaatagacatttctcttcaaaaaggagaaaaacaaaaggcacatagcagttactggtctgtaacaaatcaaaattcccctggggcaaatgttgccaggtcatctaatctaggaccattgcttctgctctctggggtgtcttcccagtttgttgttctccaaggctcttgactccattctctagtatcttggttctcccccttaaaaagcctttccttttccataagaaatagtgcagctgagtccctctctcatctgtctttctttccatagttgagggcccagagacctctttgtggcttaatcaattttagtcccttccagtccaagctgatggtgttttgttgggatgattttctttaaaatattgtgggctttctatgtaataggatatagcccaactcattgtataaaaactacacccacaatttttttttttctctctagagttattcggtgacttgggattaggcttctgtcaggcccttaagattcttaggagcttttttgacaagataaggtgtgctaggcactttcttaaatccttcagaggccttaacaaatggtcatacaacccaactcttaatttgctcttttaaggcctccttttactctgagaatattttactcaaaggttgtcaaatatggggagactggagacgaggtacagttttattttccaacaccgcaaatcctggaccttctatattccatctaaattctggttgcaaactgaacatttccttctttagctcacctttgtcttgccatactttagcatatgcagttaagagctcctaaatgacactttcgaaattctgtctggagatctacttagctgcaactaggagttcactagggtcttttctttttgaaaatctcaggagctggttttttgaaaagatcagcaaaattgatagaccgctagcgagactaataaagaagaaaagagagaagaatcaaatagacacaataaaaaatgataaaggggatatcaccaccgatcccacagaaatacaaactatcatcagagaatactataaacacctctacacaaataaactagaaaatctagaagaaatggataaattcctggacacatacacccttccaagactaaaccaggcagaagttgaatccctgaatagaccaataacaggctctgaaattgaggcaataattaatagcctaccaaccaaaaaaagtccaggaccagacggattcacagccgaattctaccagaggtacaaggaggagctggtaccattccaatcaatagaaaaagagggaatcctccctaactcattttatgaggccagcatcatcctgataccaaagcctggcagagacacaacaaaaaagagaattttagaccactatccttgatgaacattgatgtaaaaatcctcaataaaatactggcaaactgaatccagcagcacatcaaaaagcttatccaccatgatcaagtgggcttcatccctgagatgcaaggctggttcaacatacgcaaatcaataaacgtaatccagcctattaac

SEQ ID NO: 413 - DNA, 32306 bp, Macaca fascicularis
  source 1..32306: mol_type = genomic DNA
actcgctcgccccagcgcgcgtccgctctccgcactcccacatgctcgctctctcgcccgttcgctcaccccgccccgccctgcctagtcccggacgcgcctcgcgggctccccgcgccgcccggtaggcagcagggcgctaagcgagctccgagccagcgcagtgcgcctgcggccggggcgccccgccgagcgccggtgccccggctcccgggccgccttcgccgcgcgggtgagtgagcccgccccacgcttttgtccaggcgcaggccctggaagtcaaggctccgagggtgggagttctgggtgggggctgggacccccaccgtcggtgccgctcgactcccctgctggagaggggccccggggtgcggcgaggagtcgggggcgtaaggagacggccccagtgacgccaggctgcacgagttttcttttggggagatgaagtgcttggggacagtgatgcgattgcctctctaggaattatccgaagggggtgcctttgatttgaggggcggaggagaagcggacccttctcccagctcccagcccctcgctggaggactcggtgacggcctctgggaagggggtgccacgtgaaggtccttccagcccaaatgtgattccgggaaggtagggcggggaaggcggcccgcgagtgccaaacctggccatcccaggcgaagctggggctcgggctttgcagacttgttcctactccatattcctcacttaagccccttgactcgctctgcctccttcgcgttaactggggtcccactgttgagggaccttgtttgccgatgattgcagctggaaagttttggataaacttctcaggagatatgagctgtcaatggttgaggtagacccctccctggaacttatgggactaaaaccttcaagacccaaaggactgaatttctaggagtggcattgaagatgcgaagatgggctgatgggcaaatggtttctaggattttttttttttttagattggggtgtgtgtgtctgttggggtgcggggtgctttctatttcataaccagatgaagacccagctctgctagagtctagagggaataaaattagctgttgtgattcaggaagctgggtgggtgtagggaaacacctgggcagtaggcgtggtgccagacctcaggccgttggtttttaccatctctcctctccccataaaccagagtatatgcgatgacccccccaaccccacagcctttaagagcctgccctggagctgcatcccccttccaagtgaggctgtattcttccacctgaatggaatcctttttgtcaaaatgcacttgtcattaaattatttccagatggtgggcttaggaggaccatttggggaaccccacccacacttcaaagaatcaggaatggacaatgcaagtctctgggagaagtgtaggtgcgtctggtgactttattaggttcctacaaggcatttagggttctaatagaactatctgttttcttttaaattcttgacctccttctctcttctgtgattctcttagtctcttcaccgcctgcacactgtgggactgtggaggatgacgctgctggcaccacagtgcgctagggcagcatggaattttccttcctgcccagagtgaggttaccccttttacttccactctcagtgggccaggagccttgggctggggcaagtaggaacctgagcagttggtcctgggtccggagtggttggactctggatgctggtttgggtagtgggtactctggagacatgcacaagagcttttttgccaagatgtacaggtctgtcacattgttcactgatgatgcaaaggatgctgagcatcatctgcagctaaacatgagcttggagaaccaccccacagtggggaagcatttatgctggttcatctcccatgttcagtttcttttgtgtaataattggctagctgaggaggagggtagctgcagccttgtagatgtgtccttgtcttatttttattttttattctgagacagggtctggctccgttgcccaggctggagtatagtggcagatctcagctcactgcagccttgacctaccaggctcaaggaattctcccacttcagccttctgagtagcagggactacaggtttgtgccaccacacctggctagttttttggatttttttgtagagacggggtcccaccatgttgcccaaactagtctaatgggctcaagtgatccgcccacctctgcctcccaaagtgctgggttacaggcatgagccactgcacccagccggagtagctgccctttgtgtgaggtttgcccaccccttcatcaggggctgtttccccaggggccagatctttaaagaacatacgcagagcagactaggccttggaacattcctactctaactggtaaggccaggtggccccacctgctgtctgaacatggtagacagacagttacagtcactgaagagtagggcctcctggctggcaggtggggggggtggggagtctgctgagaaggcttgtcagagaaggaggtgacccagatgtggcagaggggagaggcctttgagtgccaagggtggggaaaggttctgggtctctggctagggagatatttgctggcctcagaggcatagattgtgaatgcactggggtcaccatgtactcagtgtgtttgagaatgaccccttgcttttatcctcaaaatagaagatgagcctagagtttgaaacacagctagttggcttgtctgtcttttaggaagttcataaggtgggggtttcagaatgcagccttgcttggggatagggtgcagtgtcccatgagtttggagagtctcatttagtgtctttctgagagcaatacttcttgggagtctggaaatataagcctacttggaagccctgctgcatctctcgcagctcaaaccaacccacagaggctgggagattgttcattcttaaaagcttcctgtcctgtcttcagcaaatgtagtaaaatttagaaacaacacttaaaaagtatcctttcccaacaaaagacaatgttctcacccaacttgtccaacagagggtgcatgcagaggacatgaggtagggccatttgcatggaaaatgtccatgcggatgctcaggcttgagcaggatctattgggtgacctgagtgctcagaatcaaggaacgatccagtggtgagccacagtgggacagagtgatgtcactgtgattagctcccgtgccatgtgacttctatctcttccccgtgctcccccagtctcctgccctacaagcaggcagacttggctgtgcagggcagcagtgctggtacaagccacgcccctctcccacctgcgccgttccgcagatggattctctattctttcttgagttttggctgtgcacttttccattcgtttgatgccaagaggttgagcaaatgcattcccctcacaaacttaaggtgggtagacctccgtatttgcactgcaggccagcaggtgcatccctcctccttgttgcacgcacctggtgtgtgagggctgcagcccccatgaaatttactatgatagccagcccagtgggctggggcaggaggagagccagcaaaagttgctgcctcatgggctggaaggtaaggctgtgtttccagatgctcacaccaccttcttttccctgccctcctgctcactgtacttcagtgtctgagggtgaatgggcaccccaactagggagctgtggaaatttttgtgtagatccagcttctcagatttcccatgttgtccccatcccttctctgttggtacttccatgccccccttccaccctcccttcccctccttccctgcgtcttcagtgcagagccctctggagacagaaagcccctttggcgacaaaagaaaagggataaggagaggatttccttttctttcagacctacttcttgattttttcccctggctctgggcactcaaatctgatgctaatttgttaaaccaggaccttatgggttacttatcataatctttgggggaactgaacacctgcaacttggggcttttatagttgaggatgttgtttacctttctttttttttcagagatgaagatttctgatgtatagtagctctcattcaggtttctggcaggaggaggcagccaagcagaatgtgatctttggtgttaaacttgggttcagttccacccagttcattcactggctgggtgttcttgggcatgggttttaacctctatgagctgacttgagttttgtcatctgacaatgagggcggttataaaaattaaatgaatatgttataaataggcacaaaacaaagaatagcttttattatatatactgggcagtgttctccaggtctatagaatgacttgtaaatcaaccagcagacgctaatgatgtacctactttctatcgaggtctgtagaggattataaaacaaaggtaatgtgcctatgctaagagactgggtgggaagcgagagagctaacacatatgaagtaattagaaaacagggacaacaagcaatttccaagtttcgttaagagaattaaaggatgacagtaaattcaggggctagagtgatgggggaaggcctcaaagatgaggaggaggaagggagggtgagcatttgccaggagagaggaaggcaggaacatttggctccagtgtctgaaggctgtcagctccttctttgctgggccctggcacaacacctctgaccctgcagtgcactcccaaacatgcaggtgtgtttgtcctgaggtttattttgggagggttttcattctggccctctgctgccaagaatatttctgaaacatcagaaattgttttattttgtctcgatcaaaaatattaagaggcaattgggtggccagagtgaaagcccaggcccgtagaagacttttgggtttctggggctttgtgttctcttttcatgcctcatatattgtggctcacttcctagttctggaatcacagggtattaggactaagaatcaagtccacctgacctttgcattggactgaagaggaaactctggcctaagaagccaagtggtggctgggtgtggtggctcacgcctgtatcccagcactttgggaggctgaggcgggtggatcacctgaggtcacgagttcaggaccagcctgaccaacgtggtgaaaccccatctctactaaaaatccccaaattatctgggcatgatggtaggcgcctgtaatcccagctactcgggaggccggggcaagagaatcagccagagttctcatcactatctatcctggtggaggatggtgatagcatgagaaggtgaacggtctgacttaggcaggaagaatggatacacattggttccctcatctgccccacctgcttctctagagtccttgaaggctgtcctcttcagtctgagggtcccatggggagcaggagtgaatgcccttcctttatctgcctgtgatcactgccatctgtctgcttcagggcccctggatactgagtgctgttcccctttcctggggttagactacatggaatgtcatctgaggctgtgggaaacaccgggaagacgccccgggtttggcgtctagctccagcactgtctcctgctatgtgatgtggtatctccacgtctcagattgagcacctttaagtggacagagaagcccctctctactcatctgatgaggctgtaggcagatgaacatgtgctcggcaacctgcgcttgtgacgcggtcataagggtagtgtcttgctaggcagtgtgctcctggaggtcacgggctgtggttcatctgtatccttactcatagcctggtgcttgacacaccacaggtgctcggtacatgtgggtagaaggactggctaatggggtaaatggaggtgctcagagaagattctgagggatttgctgtctgccactccatggaaggcactttccactcattcacctcacttcagttatgtcttctatagggctaggtataacctcattctaacttttctcctgagctttatgcatatttccggctaagtactgagtccattcatagaacatgactcaaacagatgtattccaaaccttccccattatccaagttaaattcccatttggtattttcctattaggtcaacagggtgatcattttcataatcacttggttgctaatcttgtagaaacgagtatgttcacgaggaagcagcaggtggttttagaacatgcctggaggaacacagttcctaccttgcaacctgcctctgattactaccaaaagctcctgccttcccagtagtcactcatggtatacatgatacaattaacacagttgctactgatgttacccaatagcgtgttttagggagttctcaggcttcttgttgcgattgggcagccaccttggggctcagctcctcccctgtgggcctgccgattatcccaggtagagaaacacttggttttactttgatattactattttttcctgaccagactgtactagctcacacttggagtattaactgtggcttctctgtagcccaaatacatcatacacttgattgctttgttgatctaaaacatagtctgactgcgtcaccaccttcagaaacccccggtggctccctgtttcacacagaacagccttaagccattcacaggcctctataatctgacctccaagcccaatctcacagcagccacccccacgctccttgatcccactacatccagacttcttgtctcagcccaatttttactttcctgtgtctctgactgtgactgtgagttcatcctcacctggaatattcctcacttgcctctttgatttacagattcttctagccttaaatatttgttcagggaatgagttaagttcctaatgactgtcagatactgcccccagaggctgcctctgatcttttcagcctcaatgtctctagaaataactccctgtaaaattctttttacagagacaagtcataaattattatggtatgtttttatcatttgtttaatttttctcatgctaaaattttatatctgtaactatactgaaaaaacatcaagggaagaacatgttaatgcctctgtttcctaatagcagtggttccagaactggctgataacaaaatctctttgggaaccttgtttgaaaaataacctatggctccccagtcccagcccagactgctttggtggggtcagggaatctctggtttaacaacgctttccaggtgattctgatgtcaacctgatttgatttttcctgggtaattctttctattatttctgtgatttgtgtattaggaaagatttttcaaagttaacagaaaccaagtcaggccagctgaagagaaaaaataacggtaatagcatgataaaagatggattctcgtattttctttattccagattataggcagtaagattcgtatcactttataatctctcaggaaaaagcacttcctttcatatagacaatgttagaaaagtttctaaattacaatatacctttatttttgaaattgcataccagtttcttcatcattataatcaaactatgaagatcctcctgaactgcaataatgtgataactgatataatctatcagtgttacatatgatttcaaggtgaaacgctgttttccataatctgtgctcatgatttttgaatgttgacgcattcttgaattcctggaataaacacttagtcatactgtagttttttttaataccctagtgactttgattttctaatattttgttttttttacatctatagtcctaagtgagattgaactattaattgtctttgcttcccttagccagttttgtatgtgcccacaattttgacatttttggcatctttaggattggcagaataagtctgaggaatattaaagtctaccagggttttatctacattttctttagattaaattttgagttctggcttttctataagtaatattgctaaaagttagatatatttttctaaaagttaactggaaactttgaaaaaaataaatattcaatatctacctgatcatctattgcacataaatcagtcacacgaacttttcctagcttcagtgtattctggtctggtaaatttggcagtttctactgccttttgattccattgtttgacaaatgattggcattttcccaggtacacaataacttttcttttgaatgctgcatcataatgggttttcttgaagactctttttctttctcatgtaaaaaagtaggtataatttatgtgcagtagaattcacccattttaatgtacaattccgaacaattagtacacaattatgaggaagttcagttctgaattttgacaaatgtatatagtcatataggcaccatcacatttgagatacagaacagctccatcacctcccagaattgccttgtaagctttggttgtctgctcttccaccacctgcagaccttggcagtcactgatctgctttttctccctgtgttctttcctatttcagaatgtcgtataaatggagtcatggtttgtaggctttttagggtgcctgctttcacttagcattaatgtgtttgagattcatccatggtagtgggtatatcaatagataattcatttttgttgccgagtattatttcattgtaaagacatatcactgtgtgtttacctgttccccagttgaaggacatttgggctgtttccagtttcaggtgataataagcaattcactatcaatatttgtgaacagatttttatatgaatatagatttcatttcacttgggtaaatatcgaggattggggtttctgggaggtatggtaaatgtaatagaatatcaaactgttttccaaagtggctgtaccattttgcattcctggtagtagtgtctgagggttatactttccacatctttgtcagcacttgatattgtcagattttaaaaattttagacattctaaaagaatagttttatcctattgtgtttttaatttgaatttccttagtgactactaatgtcgaacatctttgtgcttatttgccaaacatatcttgtctttggtgaagtatctgtttaagtcttttgcccaagttttattggattgtttgtttccttgtgatttagatttgagagttctttatatgttctggacattatctttcattgggtatatatttggcagatcttttcttgctgtctgtagcttgtcttctcattgtctttaacaatgcctgttactgcataacagaagtctttaattgtgatgaaattcaatttatcagtttttaaaaatgtgttatgcttttgttgttatatctaagaaatactgacctaatgtggagtcattaagatgttctccaatgatttcttcgagacgttttacagttttaggttgtatatttagttctgatccattttaagttaatttttatacatgagttaaggtattgatagagattctattgtgcgtatgaatgtccaattgtgctagcaccacagtgaaaagattatcctcttattgaattgtctttgtacctttgttgaaaatcagttgagcatgtatgtgtgatctattctgagtgttctgtcccattgatttatgcatttattctttcaacaataccacactgtattgattattgtagctttattgtaagttttgaagtaaggaaatttgagcccttcgacctagttctttattttcaaaatagttttggctgttacagatttttcggcctgacataaattttagaatcgtcttgttagcttctgcataaattcctgatggaagtctgttggtattgcattgactctataaatcagtttggagagaactgacatcttaacaattttgggtttttgagtacataaatagactatatttctccatttaggtcatctttgatttccttatgaatttttttttttttttttttgacacggagtctcgctctgtcacccaggctggagtgcagtggccggatctcagctcactgcaagctccgcctcccgggttcacgccattctccagcctcagcctcccgagtagctgggactacaggcgcccgctgcctcgcccggctagtttttttttgtatttcttaatagagacggggtttcaccgtgttagccaggatggtctcgatctcctgacctcgtgatccgcccgtctcggcctcccaaagtgctgggattacaggcttgagccaccgcgcccggccctccttatgaatattttatagtttttagcatataaatattgaacatattttatcatgtttatagctatctatttcatgttttggtgtaatttttaatggtacttttagtaaaattttgttttccagttgctcattgctagtatttataactataattgatttagtattttaatggatttttaaaaattttaaatcaaaataaagtacagcaaaatatgtacttgcagagtttgaaaatctaatgtgattagtagctagctaaatctaatgtgtaacttaaacaatttagaaggctgggatagaatcaattttcagtcctcatctgctcttaactattttcctgagctttttaattatttttaagcaattgatttttgtttgttgaccttatatcttttgacttttctaaactgacttattagttctagtagcttttttttctagattctttgagattttcatcatagataatcatgtcatctctgaataaagacagttttatttattcaattccaatttctttgcctttatttttcttgcttattgtgctggttaggatttccagtataatgttaaacaggagtggtgaaaacagacatcattgccttatttccaatcttaggaggcaggtattgagtctcatatcatcttatatgcattagtcataggttttttgtagatactttttatcaggttgaggaagtttccttctagtttgcttagattttctttgtctttactgtgaatgaataatgatttgttcaagtgctttttatggatctattgagatgatcatatttttttcttttgtccatgagttggcaaattctttcacaaagggcagtgtgagaaaaataagaaatatatatttggtctttattttcagtttctggcatagagcttctaaaaccctgggaatttcctgagtgagaggggtgagaggaatgtctttggttattcataataagtcccttgactgtatagcttggtgagcccctatatagcttctggatgggggctgattgtcagaggaaccaaccatgtaattagaaggttggaattttcagcacaccctgcgccaacatatagggaggggagaaggactgaacacagagtaaatcactaaaggccagtgatttaatcgattatgcctatgtaacagagcctccacaaaaactcctaattgaaggggtttggagagctttggaattgcctaagcacactgagatgctggcaagctgctggcaatgcctggagagggcatggaagtccctcaccccttttcacataccttgtcctatgtatctcttccatttggctgttcctagaatatttataatattctaggacagaacactcagaatagatcacacatacatgctcaactgattttcaacaaaggtacaaagacaattcaataagaggataatcttttcactgtggtgctagcacaattggacattcatacgcacaatagaatctctatcaataccttacctcatgtattctggctgttccagaatatttataactgaataaatattcagttattattttgctgtaaatacttctcatttggataatgttttacagtttacttgttttcatacattttgcatttaatctttgtcaatctttgtcaatcctaggttgtatcctgtaaaataaactggtaaatataaggaaagagggctctcaagttctgtaaaccattctaacaaattatcaaacccaagaagggggtcatgggagtctctgacttatcgtcggttgatcagaaatatgaggggcccaggacttgtgatcagcatctgaaatgagggcagtcttggggactgagcccttaagctgtaggatctaccactaactcaaggttgatagtgttagcattgaattggattgcaagacgcagctggtgtctagagagagacttggttggtatgaggaaaaaaactccacgtagctgggtgtcagaagtgttctgggagttaaaaacgggtcatagtagccagataacaaatattttaggccttgtgggccataaggtattttattcaactctctactcaactctcataaatctcctctactcagtgattcagctctgccattatagcatgaaagcagccatggacaatagatgggtaaatgaatggatgtggctgtgttccaggaacctgataaaaacaggctgcagattggatttggcctgctggtcatagttttcccagtcatagtttgctgatctctgcattagtctattgatatgtggaattacaggaattgattttcaaatgtttaaccagccttacagtcccagaataaactccacttgtggtatattattactctttttatatattgctggatttggttcactcaatttcattgaggttttttgtgtctatattcatgaaggatattgatccaatgtctttgtctggttttggtgtcagggtatatttgtagccttatgagttgggaagtgttccttcctcttctattttctggaagagtttgcataaaactgctgttatttattcctgaaagttttggtagaacttgccagtgacacctgagcctgaagttgttttgtggcatgattttcaatagcaaattaaattctttaataaatataggactgtccacgttatttgtttcttgagtgatttttagtaggtcgtatctttggggtaatttgtctatttaatctaaaagacagaatatttgtaaatgttcataacattaacttattatccttttaatttctttaggaattgtagtaatgtctcgttttctattcctgatatttatagtttgtgtcttctcttttgctgttggtcaatctgggcagtggtttgtgaattttgttagttctttcaaagaaccagctgtttgttggtttctttgagttttctcaatgttttttgtttccaaattcattggtttgtctttactatatattctgcttgttttgggttcagttgctcttccttttctagtttgcttagatcattgatttgaggcctttcttcttttctgataatttctagggttctcctttactgggacaattgggtggggaaaggggacatggaggtgtagaaccagttttcctacctctaaacttttattaggagagctttagtaaaaaccttaccagcagggagccctgaagcttctgcttgggggtgggaacaatgggaaggaagcaaagggtaacaccatggactgtttctttcatgggaagcagtggcctggtcttcccgccctgacagtctaggaccctaatgctcatctgcctcccaacacggtctgtagaaaagagaggaaagggagttggagttgctgcagttttgttggatgaaaggttctctcctaatagtttagaccaggagcttgtggactttttctgtaaagaagcagatacagatagtaaatattttcaactttgcaggctataccatctctgtcacaggtattcatctctgccattggagcatggaaggagccgtaggtaacatgtaaatgaatgggcatggatgtgtttcagtaaactttggtttacaaaaatagacaataagctggatttggcccatgggccatagtttgcctacacctgctttagtctgctaatgtggtgaattacattgattgattttcaactgttccagacaagttgtattcttgagatacattccacttggtttagagcatctggtctgtgctggccctgtctttgtttctcagcttgtgttgtcactgagccatgagcttctcagggatagggccacaatagggccatctctgatcttctgtcaggtatatggtggatggctagtgaacctttgtggctgggtggaaacacctgtacacttcagtggtacactgctgcagcttcctttctgggtctcctccgggagcctagaagaaacggaggttgtgtggaggagttgggctcaagtgctgtcactgcaggccccaggctgatctttcattttgagactattttagaaatgtgactcatgtttggtctgtgaggcgttgctttctaattactctctgtcctttttctgggggatgtggttggcaccatagctggcaggctcaggaactcaggcctccaggtgccagcccagtgctgattgacccctttccaggaccatggctttctagatctttttatagaggagtgtgcctgtgtgtggggaggggcagagcaggaggggtcaggcccttctggttcctaaatgaccttcatgcctgtggagtgtggactagatagagccatgtaacaaggcatgacaaacggattttgcacaggtagacttcatcattcatcttagccacttttcctaattgattgggagggctgggttggcagctgatgggaagggtctcgagctaacagacctgggtttcaatcccagctcaagaacttattagatgggtgaatctgggcacattatctaactactctgaacttcagttcactccgttataaaatggagatgtaacaacctcccagaattgttgcaaggggtatgttaattccctcaccttctctcctgggctgagagaggtgagcagagtggtggacaagagaagtgcaaaacgacttgaaaacatgatgggggaatccatttggagactgggatatggagaggatgtgcaggtccctttttctgcctagactatttctgagctgaaagatggggaggggtgattcaagggccaagtctctgattctgctctggagagagaccgccaggtctggatgatgccttaggttgtctggacctcttgtctttcattgttcagcccggttcactgggataggaacctggagctgtgccagtcctggtttagtggaatcagttgtgtaattgccttggagttaatgggaaattttaagacctcttggacctgttgataataataaccctccttatgaccacccagtgtgggaggagtgaggagagtcacctccaactgccttcagaacacccccaccttttcatgtgttctgaggtttctgctttcctcttgacaaggttcaagaccctcctgcatagctgttaggggatgaggaccctgctttcctgcagagtctgtgagttaagggcactactactcttaggctgccctgcttatcccagactgaggcctcattgccttctgaaacaatcagaccaaggcttttattggagagctcataaaacttgttaaggatcaagaactagataaagttccaattttgtcaccctgagatgatcttgtattattgtacctaaaaacagtattgaaacacagatctcattgtgacacccctgattaaaaacaatgttaatcgcctgctacgtaaaagacaaaatttcaactattcaacgtggcatgtaaagtaggctgcaatgaggcctgccacataaaattattcagttattattttgctgtaaatacttctcatttgggtaatgttttacagtttacttgttttcatacattttgcatttaatctttgtcaatcttgcaatattattattgttcccactttgtaggtgatggtccaaagcttagggaagttaaaaggaacttgtccaagatcagatggccacaataaagtcaaactaagcacaggatataaattgtgctcacttgttacttcctcactgtatgactttgaacaagtttatttatctataaagaatcagggataatacaacaaacttgtaaagtttttgtgaggattagacgagagaatccaagcaaagtgcttgggggaatgcctggcacaaagtaagtgctcagaaaatgttgggtattattacgatactctcttttaattgttccacaatgaatgttttcagtttttaattccactattatgagtaacactcttataatgatctttgtccaaatagtttattttttctgttgtattatttccttgtattatattcccagaaaagcattactaggtcaaaagatacaatcctcttttttagcctttgttccattttgccaactagccctttagaaggatggttcccatttaaaaggctgctactagacccatgggagtaaactctctcccatagatggtacttccatgcaacctcttagcccatcagagggcctataccagtcttttatcagtcattgagggttataattaccaccttccaaaaagaccaacagatcctagactggttggagccaaattttataaactaggttgtacctacagcaagacataggacccggctaatcagcaaactgtactaaaaactctagaaatggctgacctctcaactcactttctgtagggctctgtgggagtctctgcatgtgcacagcaggtagatatgaaggagtggtgttgggggaggcaggagctgcttatgagctgtggacctggggattgtagggaggaagactgtatgggaaccatgagtgacttcagattttttatgtaggagagtgtatgcatttgtttgggttcctgtaacaaagtaccacaagccaggtgactcgaaacaatggaaattcatttcctcacagttccagaggctggaagtctgaaatcaggggttcaaacagagtcaagctttcctctgatggttctgagaggatccttccttgactcttctggcttctagtggctgccagcagtccttggcattccttggttgcatgtgtatcactccagtctctgtgtctatcttcatatggacttctcccctctgtgtcagtgtatgttcacttgatgtcctcccctctgtgtgtctgcgtccaatgcatccaaatttcctcttttttttttttgatactagtcattggattaaatcccaccctaattcagtatgacttcatcttaacctgattatatttgcaaagaccctatttccaaaccaggtcacattcacaggtaccagaggttaggacttcaataggattttggggggaacacaatttaacccatgacagatggactgggaagagaaaatggaacatgtccatttttcatgtcacagactacactgtggatgaggctattggtggagaaaattatggacagtggtagtgtcactggtgggaatgctggacagttgtctggggccagtgctgcttctgttcttggcctccccagccccacttaacctaaggatttgtcacaaaactagtaactgataagtattgggtgcttctagcagggatgatgcagccacagaagaaagagcttagccaccgagggaaagggatgttctaggagccagtggggagtcatagaaataacacaggactgggcagacatgcagatctcaggttaagtctcaggctacctggaacaccatagcctcagtttccccattggagggtgaggagggagggactgcatagcttctgacatccctttctgtctggcattatataattgtaactggagaggtaacattttagagacacccaagctccttgaccctaagggttgtcctcaggtctgtctgggtaaccaggtgtgagcagctgatacggctgggtactggggaggggacaatgtggtatttcccatcccaggtctttccaacaagactttattcaagtcacctctccatgaggcctttcctggccaccctctctaaaatttcaatcttatcctgatagttcatgtcccctctttcagttttattttttctcttatatttatcccctttccaacatggtttacattttatgtattttcctcactaattgtctgtttttcccactaaacagtaagctccttgagggcaaggattttaatccaattctaaaatagtgcctgtcacataccaggcactccatacatatttgctgaacgaacgaaggtgtggtaaacttgataaatggggtgaacatttaaagggggtgtaccagttatagtctttgagaggtctcaatccttcttggctccagccctctagccaagactgcccggggtcctgccataagtagcacctgtttctgcagggtttgttccagtcatccattgctgggacaaaacttcaccaaacagtggcataaatagtggcataagacaacaatcattttgttatgctctggggttctgtgggtcaggaatttgaacaggacatggtggggatggcttgtgaggacctgaaagactgaggtgactcaaacagctagtggcttggatcatttggaggcttcttcacttaccgtctggcttctagactgagacaacttgaaggctgggctcagctgggatatgtggagccagagtgcctacatatggcctctccatgtggcttgggtttcctcacatcatggtggctgggtttctggagcaagtgttcccagaaggagcattccatgagagccaggtgaggactccctggtcttttattacctgccctcagaagtcacatggtgttgctttttgccgtactgtattgatcaaagcagccataagcctgcgccttgataggaggagtgtcaaagattttgaggccaagttttaaaactgccgcaggaatcttaccactttctcactagtcccaatctaaaattaacctgaagtaaaaatctgccaccttcagatcgggacttaatggtgaattatacttgttctctacctcactcttcactaattgagcttcttcaggaaagagtctgccatgtttatattttttgaagcacctagcacatcatctggcacacaataggtactaagcaagtcggcaagcaagtgaatgaatgcatgaacacagggaatgagtgttttctgtgactggcttagcactgctaagtagctacgggaagacttggaactcctgtctattgaggcctaagttttctaggcagttttcattcatattctgcactgctaaaagtcatgggttaggaatagattcctgtggaagagacatgatgagtatggagatagaagttgtatcgtatgttagggaatactggtaatctggtttgactatagtaaataatttctgtattttcctaggacaatggtagaacaaggctagaatgtaagggccttgttgcaggccagtgagtatagatattattcagtaatggacagtcatcaaatattgttgagcagcagagtacatgtaataggagctgtgaactaggaagattgacctgccagtggcattcaaaacagattggagtagggaaccccaaagataggcaaatcagtggatttgaaatccaggtatgcaaccagggcctagaccaagctagaaactgcaagaaagccatcaaggggagggatgtgagtgattgtgaggttagcaggtgtttggggccatgtgagaggtgacgaaaaagagaatgtaaaagatgatgcagcaattgcatatatttagagatggagtctgtcactcaagttagagtgcagtggttgcagtcgcgaactcctgagctcaagcgatcctcctgcttttagcttcctgagtaactggagctacaggcacatgcaccatgcctcgctattttttttactttttgtagacaggatctcactatgttgcccaggctggtctcaaactcctgacctcaagcaatcctcctgcctaagcctcccaaagcaccaggaacactcttacattttagggactaatttctataattttgttataaaaattttcaaatatacagcaaagtttaaacacatgtatggtgaatacctatattccctccacctagattctaaagttaacattttcctgtgtttgttttatcacctgtctgtccatccttccattgtcaatcagtccatcttgtttttgtgatatgtttaagtcacagacattgggaaattgtacatgttcccctaaatacttaagtttgcataccattaccttgagttgaatactgttgacattattttttcttttgaggtaaaacttatttatagtgaaatgaacaaatcttaagcatgccactggatgactttggacaaaagcatgcacctgtgcaacccaaacccctttcaagatttggacataaccatcatcctgcaggattcctttgtatttctttccaatttctgtctccactctccagatgcaaccattattctaatatttaaggcacagatttgttttgcctctcctagaacttcaaatacatgaaattgtgtggtatatattctttggcttaatgtttctttcatttggcctggttttgagatttatccatgttgttttgtgtatcaatccgttccttttaattgctgaagagtatttcgtttatggctataccacagtttatttatcccatttccagttttggagaaaaagttgtttccagtttggctattctgaataaaactgctatgaatatttttgtataggtctttttgggtagtcatatgttttcatttctcttggtaaatatataggagtggaattgctaggtcataagatgagtctatgtttagttttgttagaaactgccaaagtatctgtttccacatttatacattataatatatgatacattatacactccaatgtatcagagtctagttgcttcacatcctcatcaacatttggtgttgtcagtcttttaaattctagttattctcatggattctgctatggcagtatcctattatggttgtaatttgcatttccctaataattaaggatattaagtgctattatgtgcctattgaccatttatgtatctttctttttgaagtgttattcaaatatttcacccatttaaaaatttgaattgtctttttattattgagttgtaggaattttttattctgaataccagttctttatcagatatgtgatttgaaaatatgcttttctaatttatagcttgcctattcattttctttcttaaagcagaagttttacattttgataaggtctaatttatcttttttttttttttttggcaaggctattttttttttctatgtccaaagaaacttttaccaacccccaaattaccaagataatcaccgtgtgttcatctagaagctttatagctgtagtttttatgtttaggtttgtcatccatctcaagttaatttttgtgtatagtgtgaagtagggatcaagatttcttttgttctcctgtggatatccagttgttctagccccatttgttgcaaaaacactttcctttttgttaggtactgtttttattctcttgcagaagaagaaactgagacagagctaggttaagtaaccacacctggcagagacagatccaggatttgaacccaggcagtctggatgcagagcctgtatttaaaccactgtgttataataacccttctcacatggatgacaggttttcaacatgaatgcaggcagctcagtgtaaagccctggtagggaattcaggaagcaggggagttcagtttgggattgagctgggagcccatgggatacctgagtgggcacactgggtagaggatagaaaaaagaagggaaaaacttggaagaacaagtaggggagaagggaggtgggggctgctgaaaggggatgttattaagcctaacctggatttcaccttttttatttagcatcaggggattggttctctatcatatcaatcctggtctagaagagtcatgaaataggcaagatacagctaatccaaatcttttgaatctaggtagtaagggtgacatgagcaagagtcataaagtcagagaagataaatagattaagtagaggtagggaaagtcagcaaacttcatgtttaggatgcctactctctgttagacagacctggcttcaggtcttaatccagaccttgcagcttactctgtgatctcaggcaagtgacttcatttctgtgcctcatttttcctcatctgtaaaatagagataacaccaacctgactgaattaaaataaacaatggatttagggcacttagaatagtatctggcacatacactcaataatggtgtgccagctattttaagattcagtattttaagaatgtggtcagggcccggaatatagtagaccctcaggaaagcttgctgaatacacagatgaactccagggacacaggattccccagctaaaattgtgtaactgtgcagttttagcacagatggccataaagttaaagtaagaagctaggagctgagctggtctctaaatactccaggtggtacaggaggcagcccagactggtgatgctgaaccagcatggccttagagccttccttaggaagggcactgactgctggctcagattccaatggagcccccatgggcctggagctctggagtgggcggggaaggtgcttctgctctgagtgaacagagagctccctgacagcaagcatgaggatactcctgtctgcggaaggggtggcacctccagtgtgttgttgcccagatggcccacagaaacccatgtctatccctggttttgatgactatgtcctgaaagatgcagccccatttctagaaaagcccatttgaatggagtttgtaggattgacatgttgagtccagtccactctccatatgggcaggaagcagagtcaattaagcacttgtcaagtgcctgctggttacctgttgagactctgtgctgggttaggacactgttttcttgctgaccaggagctcacaatgtagttagtgaatgacacacacaaagaggtatatggtacatgccagatgtaaatggccaaagacagcttgggcacagtcatatggataaatgctttctacaagggttgtcacactaatgctagacattcaggccctctggcgtctactctagttgcagtaccttctcccttccaacagtagtaaccgatatttgagtgttcactgtgagggcagcactttagaactgttaactaaggttctccttatgatgaccccatcaggggagctctcttagtacctctgtgtttgagatgagggatctgaaggacagacacctacaggcttctacaggtgcattgctggtgagcgacggtgcagggtgtgaacccagctgtcttgctgcagagcttaccttggtaggccctcggggctgcttggctagtttctctttcaaatatagagcaggaaggaggattattgacattttctttcatgatctcaacatgcaagcacacagtgtccaaacagttttttttgttttgttttgttttttgttttttttgagatggagtctcactctgtcgcccaggctagagtgctgtggtgcgatctcagctcactgcaagctctgctttccaggttcatgccattctcctgcctcagtctcctgagtagctgagactacaggcaccctccaccatgcccggctaatgttttatatttttagtatagacgaggtttcaccattttagccaggatggtctcgatctcctgatctcgtgatccgcctgcctcagcctgccaaagtgctgggattggaggcatgagccaccgcgcctggcccgtgtccaacaagtttttacctaaatatggcctcctgtacattttgccctgacactggctcagttaaaatattcttaatttcagaagaggagataacaagacagaactactgtgtttattgacctatttaggctggctcagggcacagcgctgaggatgggagcacactgagtactttaacaatccatggcaaggtgacagcatcttgggctcagacacaagaattattctcagacagggcttttttcagtgccataaatttaagcagctggaattcttttccatcccattcaacctcctgaagtaaagaattttgccttttattgggaaatctgcatttcattgtatagatagaacactatgtccttggctccctgatctctagagaagctaggtctttattttattccaggttctgggtgtcattaggctcaaataccaggaagtctctttcagcatgagaagctagagacacagcagtgccctgatcaaagaattcgagaggccagctgtccacctggtgcaacgcaggccttgtacacagggtgtggggaagaactgcaggtctaggagacagtgatgctggctgcttagcagcgtggctgcccctacgcctctggtctgtagctctgtgctgggcctgctagggcatgagtactgctctgctgtctacagaatcaaaggagggtattttaaccagcatagcagaaggcatcatcccagtcactgatgtccttcaaaataactttcttcagaaagtatgtacttatgctagtgatgatgccattgctcaaaatgtttttggaatttcacttttagaattgtgtttagtttagaatcatgcttttttccttccttctgaggaggagtttttttttctaactgcatctgaaaatattaaagaatctattgcttaaaaatttatatatgtatataaacttttttgtttctattacctaaaggggaaattactggcagcaatttgatgcccacacattaccagaaacagatgataccagtcatttaaactttctaatacacgctatctcattgttaatttgtgcttaccactactgaggttgggcatgtttccatgtattttggctatttgtgaattgtttgttcttgtccttggctcatttttctattaaatgatttgtctttttctccttgagctatggaagctcttcatatgatcgtagtatatggacagttcttttaatatcttgtgttatgatacagcttcatcttttgaacataaaatagacttttggaaatgcatatcttgtgactgattaagtcaggctaaagtgacttcagcaatgttatttcagtactcatgtctggagcgacttaaacctttcacggacttggagtcagatgtaatcaggaatagacagactgtgttggaggtgtgattaggatgagtaattgattgactcgttgagaagctgatgaaaacttcatgtatacatacctaaaacattttaacttaaaacatagaaacatttggttgcccaactttcactgtgggacccaactgggtttactaatgggagcctatgttatcttacttgtttgctctatgcctgtaaggcaatttttacacattccattttgaatctttttagtgtagaatggaatttaggcactttgaaagccatcagaatgtagaactcttttagtttttataatttttctgttttttacagttgtcccatccaaaccgaattcaatagtaattttttaaacaattcatttctatcatttaactttcacagaaacagatcttttatattcacatgtaatcacttcatatactatttaaattatatgtaaatttagtcattccatttcaataataaatacaatgggcataaccggttttagggacaagccagctgactcttggtaagcacacagctcacctggagggggcagaagtgtgcaggtagactagagaactcgagaatgacctcctacccctgggcattcagcatactgtggcatcagttggtatcttatgtagggggagtggaaagcaatggctaaaagggtgatcctggtcagcagaggctatttttcagggcttctgctctaactaatatttattgggtgaccactatgtgacaagtatgctaagtactttttctgcattatttcaaatgtttgaggatatttaatccttatagcatcctttgaggtacaagtactgttatctccatttttagatgagaaagccaagggagagggaagttttatgtttacctaaaacacatagtcattagtaagtggcagagccaggatctgaaaccaagcacaggctgtactctaaactgttatagaaatagtttcatagtaaaagctggaaaagatggatataaaatctgtaggcatacataaacaatgacttataagagtttgggggggtgggattgtgacaggtcaacactgtattttaactgatgaaagggctatgcccttagaactctccatacattgtcttctaaaggatgcctgttgagtttgaggtaacagaagggttcttgatacacaatagatgaccagggcatattgatttaatctggttctggactctccaaccagaatttccaataagtatgttagcaaggctatcagaaaggagtgaattagagactgtgtggtggtgtctgaagacttgcatcaaatgccttaaggctttgggagaggcaaagccgagattgtgccattgcactccagcttgggtaacaagagcaaaaaaacaaaacaaaacaaacaaacaaaaaaaaacaaaaaaaaaaaaacaaggacacacaaattagtcaaggcaggagcctagacctcagccagatatcattttttaacctactgctacatggtctagactctattttgccttctggggactcacataaaccatatgcagtcatgaaataactcatagaggtggatgggatgtgtaagatagcttatctaagaatgctacaaacaaagcaggcagggcattctgggagaagacagatacaggtagtatcaagtatgaagaaactattccaggtagcccagcagcaggtgcagaggagaggaggcgtgttggtcacaggatgtgtgaatcacaggatatatgaggacatggcactacatgagaccagtgagtaggttaaaggccacaaaacagcattccagagaattcagacttcctcctaagactgtggaaaaccatggaaagactttacatagggaagtggcagatttgctttttagagagatcccttggttgaagtggagaataacttggggatagggagcaaggcaggggctaggttaaaggtagggggactaattagattgtgtgatcaactcaagtgaaaaatgaggccctaataaaattagttgtggagctcataagtgggagttgaaaaatgagaacacacggacacagggaggggaacaacacacaccaggacctgtcggagggttggaggaaaggggagggagagcattaggataaatacctaattcacgtagggcttaaaacctagatgatgggctcataggtgcaggaaaccaccatggtacatgtgtacctatgtaactaacctgcacattctgcacatgtattctggaacttaaagtaaaatttaaaaaataaataattgtagagctaagtgttacggaaactaggatcagattacaggtagagtgacaacgtcatccttgtttgagcaacaagagcactggatttaggtcaagaggacagggttttagtttcagccgtgctgctaattagccaatgccccagtctctccgagtcttattaaaatagggatgatatcccctgtccagcctgtgtcctaagatcaagtgaggtcatgtttgtacagtttacccttgaacaatgcagggattaagggtgccagcccctgactccatacagtggaagatctgagtataacttttggctacccaaaaacttaactaccaatagcctacagctgactgtaagccttaccaataacataaacagtcacttaacacacattttgtatgttatatgtattatatactatattcttataaaaagtaagctggaaaaagaaaatattattaagaaaatcataaggaagagaaaatacatttacaatactttacttattgatatcaaaagtttatgttgcctttttactagatgaattgtctgtctgaaatagtgggcagctgcagacctcactcagtctgtggtacgtatcaagcaattcagcttttccttggaatgtcatgactttcctcagcatcactgggtgacacttcatatgggtcctgtggtgtcattcaaggttgatggtattgcactaaccatgatgaaaaaatacgtgagcaatgtgagaggtcattatttactgcaatacacaatttactggagagatgaactgctcacatggcattttaaatgggcactcacaatgcttgagcttcccacaatagcaacaggaggtagctatgaaattaggacagtagtacagtatgcactacagttagtatttaatactgcatctttatatttgtttatatttctctgggctgcaaaaggtaccatttataggtgcataagttttcatcaattttaactttttataacttttttatattttctggtagtaaatgataaagtagactagtatttacatgtattttaggcattcataacatacctaacttcttaatttttttttcagtatttctaggttacatgatttattggtgaaaaatttcaaattgttgtacgtctccaaaagatttttaaatatacttattgaaaaaattccctgtaagtggatgcatgcagttcaaacctgtgttgtttgaaggtcaactgtgaaagcattgaaagaagtgatatggagccagtttggcaggaagagagctgtcaatatgggtgaacagatacattttagtgaaagcaggctgctatgttttggatgtcccctccaaaactcatgttgaaactgggtccccagtgtgtcagtgttgacaggtggggcttttgtgggctctgccttcatgaatgggtaaatccattcatggattaatttattaataggttaatgaatagattaatcgattcatggattaatgtgttaatggattaatggttatcaagggaggagaactggtggtgttataagaagaggaggagagccttgagctagtatggtcagcatactgcactgccttaggaatcttgagtccccaccagcaggaaggttcttaccagatgcagcctctcgaccttggacttctcagcctctgtaattgtaagaaatgcatttctttcttactccttagtttctggtattctgttataagcaacagaaaatggactaagaggcctatggctatctcaggctgtctggggacctaagagagaaagggaatgggtgaaaggttagaatcacatttctgaaaaacctagtcctattttcctttccttagtcctctccttagtccccagacctctcccactctggagacctctcagttctcccaagttgcactctgcatttttctgtctgtggtaccatcttcagggccaaggacaataccacaggatctgggcactattgcaagtgataaacataagcttgacaagcagatagctccccagagcctctgtagcaggagcagcagcaagaaaactaccaatcctcagggcactgaagagggcccagaatccaataccagtgggtacccaaaagtcctttgtcctttggtttacattatgccagtggctgagagtcatcaggctgtaggccccgagtgcaagtgggagagttgaagtgcaagggaaaatgaatatatacaggccagggtgacaggcccagtgtaggctattaggctggatttgccccaggactgaaaacttagtcagggccatagcccgtgacacacaattttttttataccaaagatcagatgtcctcagtttgcaatatggaaacaatttgggtttgggagtcatatctgaattcaagtccaacctgtataacactttgagaaatcactgaacttctctgagcctgtttcctatattgaaaaataaagataacattgcccggtttgtatgagtaactgatgtgaagattaggtgcatatataaaatgcactgtaatacataaagaaggtccccattaaataaaggctgttgttattaagaggtactcagtaaatatttgaatgggtaacatagttaaatggaaaactggctgtgttaaggttgacttggcaaaagcaaaacccaaaagaggcacacatatgaactaacccctggtggttagcattgagattgatgtgcctcgttcaacctggtaccctggtgagaccaattctgggcagatcccagtgtatgcacaaaccagagggttgtagtggtgtgttacagaggaaaatgttccagttggggaccaactttttcattccatactcacaggcaaccaagggttcctttccaagtaaagaggaagaaaaactacttaagtgtcataggttctccatttgttgattccaaactaggtgttgtccctttatatgcccagtaactgagtaaggataacatcacaaacactggagactcaggtgcccaggccccggtgtacaaagttttgttctggaaaaaatagacttgtagttttgagatataaacaaatttcagtattcactgtttcctctgtcgtctcactctttctacctgaaatgtttacacttgaatgaatggaaaagattatattagtctttaaaattcctgacaaagtcctctgctctaggtggcttgatcagtgataactttggtgtaaaaggagaaggtctcaaatctctagggcaggtggtggtggtggcaaacagcaggatcggggtctatttgctttggttactgtgcttgtcttttggagtgagaggctttggcaaagtgacgatgcttctgaagcaccagttaggaatggttggcattcacaaatgatctcctcctcatttttaaaaattttaattttgtttttatttcttaatttctcgtatttttttaaggacagggtctcactctaccgccaaggctagagcagagtagaacaatcatagctcactgtagcctccaactcctgggcttgagcaaacctcccacctcaacctcctgagtagctagaactacaggctcacgctccagcctgggtgacaggatgaggcctcatctcttaaaaaaaaataaataaacaatgagatcaggtatatataaaaacatacataaatgaaaaatgtagttattgaagtaagatgcaatagatgggatacactggagactggttaccattgaagcatgagttaacagattgaaaaacagtacagaaaactttagcgtggctgcagcgcacaaatataaagatgtagaaaacagaaaagaacagtttaaaggtatggaaggtaaatgacaggcttcaacattatttaataaaagctacagaaagagacttaaaaagggaatggaagtgaagcaatatttaaataaatgattaataattttccagagttgagtaacaacatgagttctcagattaaaagtgtctcctaatactttgaaagctaaacaaaagttaacccacaattagacatagtgaaactgcagaaactgcttttttttttcctcttcagaaaagagaaaaaagaacaacctaaagatcaaaaataaaaatactagttatgtataaataaataacagactgacaggtgtttcatcagcaacaagagaggtaagaagacagaggagtaacttttctgtgttgaacctaaaatactatacctaaactatcccaggagaatgagagcaaaacaaagaccaagagtataaatacaaagatgctcactaaaataactattaaaggatatatttgggtgtttttttctttttaattcccatttctgttttggatttggtgggtacacgtgcaagttacaagaatacattgtgagatgctgaggtttgggcttctgttgatcccatcacccacagatagtaaacactgtatccaataggaggtttttcagcccttgccccctccccctccttttggagtcaccagtgtctgttgttcccataaaggatgtgttttggaaagaaaaaagttaaacaatgcgaaaagatgtacaatgtaagaggcaatggtaaacatagaaattgataaaatatatttatatttatttgttagctatgcaaaacattcataagtgtgtatgattttaaaaacgattaaaatgaagactaggcaacaatagcaagatggttcagattattttgggggaaaatgttaaagtcatattcagagtcaggaagataataattatagattttttaagaaaaaactatagtcatcaattgtacccagagggttaggctacattactaaactcagtggccccaaataaacagtgtcttatttagcttccaattctttgggctggttgggcagtttttaaaatctaggccagctcagcagatcttgactctatcatgcctctatggtcagctggtgactgt

SEQ ID NO: 414 - DNA, 32306 bp, Mus musculus
  source 1..32306: mol_type = genomic DNA
ttcccagtccagagagccgcgctgccgcccgccggctcggtccgctcccgcctgctcgctgctcgccgccgcgtagggtcgccacatcggcgctcgcagccgctccagctcccgaggcgcccgtccaaccggccgcggagcccgacgcctgcggctgcgcgtcgccgcgctggtgagtgagcctgcccgcgcttttgtcctgccacggtcaccctgttcccgttgagaatggctcctaggagcggcaagagttgggtgtgagggggacactagctttaaaaggatgactcctcccccatcccagcctttgcagagggcttgattaccgccaggtcctccaccaccagtgtgatgctgggatgtggatggttcgctctctcgcactccacagagaccaccgcgcttcgacttgcttcgggttagccggggcgctttcctgagggactttgttagagatgcctgctttagagaagtttggaatagactgatcactaggagtagcttagatagtatgctcttctggatcttagggatctgaaactcttcaaaacccaaagaactgagtttctaagactggcacggcagatgggaagatactgttgaggagaatgttcgggcttttaaaaatgaaattgaggtgggaatatttagctgtatgataaaagaaaggtcccgctccactgggatctgaaaggaatacaattagctattgtgctttcagggagctgtgttggggtgagggtgcacccaggtagtggacatggggctggctggcaaaccatctcttttctcaagtgcaaagaatgaggtatatgaatttccccttctcccgcagcccctcctcctacctcagctctccagagcctgcttgagagtctctttcctctcccagaagatgtggtgtggtccttggcctggaagaatctttgcttgttgttaaaatgcacaactctactctaaagcgttaggtatccacacatcagtctctagggggaaatgtgacgttgctgtaaccaatgttcctaaaaccttcccttttcttccccttggccacccttgtctgtcagattcgtgacctttgctactgttttccactgtctttcctgtcttcgccttctctgttctggcccagaaagagctgtggagggtgatgccttgccttctgtgccctagattagtcaagtgatcctgcctgtgtccagagtaagattgtcccagggctcccaccttcagcgtccaagaacctaagctaaggctagaaggagctttcttgaacacttggttctgagtgggagaatggttgtactctggggacatgcatgggagcttttgtatcaagatgaagggatcatacagcttgcagaaacaccctactgtgctacaggtccgcactagacactcgtctcttgtgtgtgtgtgtgtgtgtgtgtgtgtgtgtgtgtgtgtgtgtgaaagagaggaggtactagggtgacactatgattggccagtggaggaagagggtagctggggtagaggtaagggtacacctgggcagtgctcatgacagagctcagatcctcagagtaggttctgtgtgtgagattccagaccccttccaccagaagctgtttcccaggcgctggatctcagagaacatgtatgaaatcaggactttgggatatttgctgacctaactcgtaagaccaggtaggcctacctggaacatagtagacagacagctgtagtcactacagagcagggaggaatcttcaaagaaggcttgtctggccaggtgtaaggagtcacgggtcacaggtcacaggtcacaggtcacaggcctttgcaaggtacttggtagaagaagagtgttggtcctgacgcgtaagtctcttcagtgcattctctgggaacaccaaggactccctctcaagaaacaccccttgatccccccccctttgatgtataagatgaatggctacacatctttatttagtcccatatttttccctgtgaaaggcacctagttggtttgttgtttctttgttaaagagactcacacagtagggatttaagaatgaagcattgcagtcaacacaggagtctcgtttagtctctttctgagaaaaatgttttgcagtgcacacacattattcgttcataaaagcctcctgttggtcgggcagtggtgacgcatgcttttaatcctagcactctggaggcagaggcaggaggctccctgtgagttcagaggccagcctggtcaacatagcaagtcttaggacagccagaactacatagagagaccttgctaaaacaaaacaaaccacctagacaaacaaataaacaacacaaaacccctcaccttctgtcctttctgcaaagctagtggaatttagagaacaacactgtataaagtaatgttttccaacaatagagacattcaatatagagcaattaaaaatgttttgagagtataattacatttcccctttccctttgctctctctaaatattccccacttttctctccttcaaatccatggcctcttttttcatgaattattagtagatacatatgatatgtgcatatatacacatatgcacacacacaatctgttgaacctttccctgccctccacctctggccaacaaggggtatgcacagaagccaagaggtgggatccatttgcatggaagacttacacacatagatgcttgggtcccagtaggatcaactggttgtcatgggggctcagaaccaaagaattatcaagcagtcatccagtctgaagacagagcaatgtcactgcagtgagccccggtgtcacgtgacttctttcctttccctttgctctctcagcctcctgtcccaaggagtcctgaggtgccaggcagcaagctgcctgtccgtcacatatctcccacatctcccattttgcaggtgcctttcattattccgatttgaattttagctgccaacctcttcctccaggtaaagctcacagggtgagtaagcgctgctcttacatgcacgtgctcagggctgttggacctggtttgtcaccacaggccaggaggtcatcctttctgccttggtacctgcacctcagatgccaggctgtcgagttgtggcatgacaggcggggctggggcacaggccgggtcagcaggaattgctgcttgcagctcagggactgagggaggctgacttttcagctgctccctgggatcttcttttcagtgtcctcctgctcactgtccctgggtgtctgagggcgaatgctcacaatgggaaccccactagggagctctgggaatttctgtgtagatccagcttctcgaatttcccagcgctgtcccctcccccactcctggtaggtctgtgcccctccctcctattctgcccaccctgggctctgctgctctgctcctccctcctgggtctcagtgcacagccctctggagacccaaagcccccgggacaaaggagaggggatgaggagaggatttcctttctttcagatctgcagcttgattttccctctagctctgagcccttagatctaatgttaatttgttaagccagggccttataaattacttctcatattcgtcagagaacactggtaatttgggcacatattgaggtttaaaaaaatgcagctgtggtgtaccttttgtttccagaaattaatgattttttttttttttttgttaaagtacaggtagttcttcagaaaactggcaggaggcaggtgaattttgaactttaaccatacattcagatctgtcctgtcctgtttactggctgggtgttctcggggaacagtagtgtctttatttgaccatgaaagggcagtttcaaaaattaaattgccaaggctgtagtaattcagtcactgaagtgcttgcctcccaagtgtgaaaacttgcgtttcatttccagaagccatgtttaaaaaaaaaaaaaaaaaacagccttggtggcacaggcccataatctcagccctgggaaggcagaggctggcgatccctagggttcatggccagcctgtctagtaaccagccacctactaggtgatcttcaggtctgtgagattttctatctcaaaataacaaggcagataggtggctcctgagaagagacacctagagttgacttttagcttccacatatatgcatgcatgccagttcgtgttcatccatacatacatgcttaactaccggatggaaaatagggaaatcattattataacctactgagtcacagcattcatcatgcccatggaataactataaatgagccagcaaacataattagctacctactctccactacgttgtgtggatgagcataaagccaagggtcttagcccttctagacttgggtctgtatgaggacacagttgccatgaatgaagtaaaaagaaaacaggaatgacgcagaacttaaaagtgtgcaaagcagcaagaagctcagggcctgctgtggtggggaaggcctcagacacaggaagagagcagggggatgtgtgctgggagagagggccaggaactcttggctccatgtctgcaagggctcagccccttctcagctggcacctggtgggacacctttgaccccgtgctgttcccccagccatgcctgtctgcttctcctgagatttatttcctgaatgattttcatttctgggcttgttttctttctgcccagagtattccaggcgtgaattcaattttatgctgaatcgaaaataatgagagggaattctatggcttcagcaaaggctccgtcccatggaagtctggtggtttctgggggctctgttctctcttctcgtgcttcgtttgtcgctctaaactgctgagcactggactaatggagacatgcccacatgagtttgcaggagcaaggaggcataagaagcaccgtggtgaactgaatcacccacagttttcatctcccatctgtgctgatagaagactgtgatgggctgggatgaccaatgtcttctcctaaaacagaggaatgggcacagactggccctattgtctcttctagttggagccctagagtccttaaaagtcaccctccctaatttgctttactttaaattgttatttagctttggtggtatgggtgttttgtctgcatgtgtctatatatatagaatgcatgctgtgcccacggaggccagaagagggcattggattcccagaactgcagttagagattgttgttagctgctaagtgtgtgctgggattgaagtctgatcctctgaaagagcagccagtattcttaatgcccgaggcatctttccagcctctgctttgtgagtcttaaagcacagtctgaccatgccaccccatcttcagaaacctctgctagttctggtcccttggaataatctcacctagaaattcagaaacaccccacccccacccccacccccacccccacccagccccgtgtctctccaagttcgctgctttgtcccacaacagccttcacctagtgagtacttccctgtctctctggtgcattctcttctggaacattctccatgtgcctctttgccggtttaactcttctgtctttacctggttgttcagcaatgagttgagtttctatttcttgaccccaatgcaggctgcctttgacctcggcttcaaaatctggagcaatctgttcttgcagaatttaaggtgacaagtcatgcaggattatggaatgctttaacattttatttgatttttttttatggtgaaaatttataacaactttggaaaatctgctggggaagggtgtagtggtgtttattccttacagcagggttccagagctgtaaaataatgtttcccttctagtccagctggctcagtgggtccagggactctctgatgtttgccttgttttgatttctgcttttgttttttttttttctgcacaaagctccctggatgattctgagagcagccaaagatgaggctcaatcctgagtggatttttttttcatgatgtcgttgtttctttgttttgtgaattagcaataaatcttcagaattgacaaaccaactctggttaggtaaaaagaaagaagggagggagggaagggaggagggaaggaaggagggagggagggaatggggtagggatagaagctgtgccttgcgtagttagtttctcaggaaacaagcatctcctctgatgcacacatttgacagtggccaagcattttgttcatagagctgcatactcgtttcttcatcattggtacaactaaaatgaaagatccttccgaactatgttagtttcacatgattttgggatgtaacgctgctggtttttacaatcagtgttcatgagttctgaatggtggtcaatccttgtttcaagacagacactgggttaagatttagatttgttgctgtttttgtttgtttttagggcatgttgtctctgactgtgtggtattttattttgggtctttgcatctatgtctcaagtgagataaaactattgtttttgctttctttgcccagcagtgtttaagcctcagatttttgacacctttccttctttgaaatgaatagaaccactctctgagacactgaaagatgctgtaatttccctacatttctttttcttctctctcacctgagcctctctctttctctttctggatgcagaagtgctacctcctcctctcctgcccagctaatggctgaatctgctctttattgaccaataagaaaaaaaaaataatgagtcaaaaaatgcttcatagtaatgataacaaaatccagactgcacccagatctcccggaactaaaatcagcatctgaatacacagggagcagactatcccctaacaaggtccaggttttacatttaagtttgatgtggtttggtttttgagtcagctgttatacttgtctcaagacatagagattcttttctcaacaggaatgtctagttgtctactgtagtgaaaaactagccctccctgttgtccctttgttgaaaattaatggagcatgtgtgtgggggatgtcagctgagtatttcccactgctttatgtgtttatcttagcagtgatacagtatcgaggcctttgtatctttattagatcctttaaaatcgagaagttgaatcaacttactcccttctcaaagttgttcagccattctagagcttttgctgttcggataaattttaggacttccatgtggatgtctacattaaaatcctgctgtaagttttgttgttgctgtttgtctgactgatgggttgattttgtttgtttgtttgtttgtttgtttatttgctttatctttctgagacaggatctgttcatactcttgtaactacacctagaggcaggcctctgggcattgtctagattaaggttagcctctaagaacgagagtctctctctgtctctacctctctctctctctctctctctctctctctctgtgtgtgtgtgcgtgtgcgtgtgcgtgtgcgtgtgtgtgtgcgcgcgcgcgcgtgtgtgtgtattgtatatggatacccgtggaagccagaagaaggcagttgattcccccggagctctggagttacatatgtttgtgagctgcccaatgtgaattcagggaactaaacttggtcctctgccagagaagcaaccactcttaaccaatgggctatctcctttgtcttgagattgtcctgattatgctcactgatatggaagctctgtcttcttactatggttaggatcattcctttggtagcagatcctgaactgtatgaaatggagacaacaagctaggtactggcatgcatttgttcatgcattactccctgccgttgactgtggttgtgataggaccagttgcttcagttccctgcttcagttccctgccgcttctcagagatgggctgtaacctgccgtggtgagctgaaaacccccttcctcttttaagcttcttttgtcagggtgtttatcacagcaacagaaaagtagaccacaggtctttattgcacaacccaggctagcctgcagttcactgtgcagatcaagtttccagtgtgcagcagctcacccactttgcaagtgtgctaatcagtagtagtttcacattcaggagaacttacatcttagtggtgtgtgtgtgtgtgtgtgtgtgtgtgtgtgtgtgtgtatgtatatatgtatatgtgtatatatgtatatatgtatatatgtatatatatgtgggggggtgggatggggggtggaataggtgtgtgcagcatacccattagccatctctctctaatgaattgtgtatcgtatgatttcttcctcagtgttctttactttttatcatataaatgttcagtgtacttggttagattctaaacttatgcatcgtatgttttaagttttgaaatataacttttagtaaaatcttattttcagattggttattactattatttataattacaataatgtattttagcagaattttacaaacttaaattttggcaaatacatacatacatacacacacacacacacagatagtattcggggatctactataactggtacctaattacagttatctgaccaaaaatgtttaatttgcatagccttagagcctaaggtatagaaccaagcttaaggctttactgacttctctgcctttaaaatgtttctctgggtattcttttttgagttgattattttttttttgtaattgatcttatattaatgactaaccgactacctacttgctctctctttctttctcttcttttttctcttttggtttttcaagacagggtttctctgtatagccctgggagtcttggaactcgctctgtagaccaggctggcctcgaactcagagatccacctgcttttctgcctcctgagtgctgggattaaaagtgtataccaccactgccaggctatgtgacatttaagtctattagctagtactttatttgtaaattctaagagattttcattgcagataataatgtcatctttgagaaggacaattttatttcttctaaccctgtcacttgaactctcactaattgctccgggtttatgtgttaggctctgcagtcttatgttaaagataagtgatggagacacaaatctctcactgccttatttttcatcccggggccaggcatctagccttaagcgattctgtattgtattagaagtgagactttcgttcatgccctttataaggatgaagatgcttgagtctgtttttatactgtaaagattaatttttttaaaatcataaatgaacattttttcaagtattttttctttggggcctgttgaaaatgtcatatattgctttcctttattctgtgagttggcaaaagctctctgcaaaggaccagtgtgatcttgagatacttaagaaatatgtatgttgtctttacctcccgttttggcagataaaacctacagtattcctgagtggagtggttagaccagtgtctgtagcaggggtagttattcaaaagaagttccaactgtactttccccttcgcatagattcaggctgagagcagagtcagctgaaccaattctgtaaataacagattgcttcctaaccttcagagaggtgagaaatactaacagtttagctaattgccaatggcaagggagatattttaatcaatcattttgtgaagtggagcctccataaaagcttccaaattgtggggcttgaacagatcctgacgtggtggtggtgtgcctggagaagcatacaggctccaggtttcttcttacatagccgtcccacgtctctaatccatgaggccattcctgtgttgtgtccttcacaataagcctgcacatgtcagtaaacagtgttcccgaattcttagagcggttgtagcaaattaatgagcctgaggaggaagtatattttgttttgcctcttaatagctgaccagtcagaattacagcaggccctggacttgactggcatctgaccatggggaacgaatctgtaagcagagataaatgggatcagatctgaactgaggggcaggatccccagctcgtgtctggagtctcagagacttggatggtatgagggcaattccctgctcccctatatttgctgccagtgtgttgtggaaatgaacaagccatagtagccacatagtaaatatgctagacttttgtgttctgtaaggttccagcacaactccttactcaagtcctgtagctctcttatagtgactcaatccagccactattgtgagaaaacaataaataatcaagtgggtagaattgtgttcagtactcttcacttaaaaatgggcttcagttagatttgtcctttaggtcaccctttgcccagtcatgatttctttgagtcctggctttgtctgttagtctgccattagttgactagccaatgtttgaaccagccttgtgttctgggaatgaacgtcacttggtcactatgtgtcagtacttctatgcgctggattcagctcaccactactttgttgagggtgtttttgtgtctatatttgggaagtgtattggtccggctttcttgtggtattcctgtttgatttccatggcagggtaagagcttgaataccgttccctccaaatttctggaagagtgtgtataaaagttttgttgggggtgtttttaatttttgatgggatggttctagcaaatttaaaaaataaacacaggaccagtccagtgttcactctccagctgcttgcagcagttggtaactctgagcaatttgttcaccttttctagggtagaatcgtgtgtgcactgactcgctttttaattcctttaggaattacactgacacctcattcttcctcctggtatttgtggtttgcgtgtgcttttccgtctccattagcctggtcgaagccatctttcctattggtcctttgaaagactcagctgttgctttcatcacctgccccccccccccgagattttctgtctaattccctggttttctctgtcatttctcctgctgtgtagttgctctgtcttttctccacggtaaagcagctgcggagaccacggagctgacacctttcttttctagtatgtgtggggttttcctttctgtgtcagtaggggtgggcaatgagtcacagaggtgtagaagtagtttcctgcctgtaaacacgtttagtggaagtttcagcgataaccacccagggattccctgctttgccttgggtgaggtcagaagaaggaaggggacacatggaagaacatccactgtgaggtcagaggaaggaaggggacagtggttgttcttttttctatctccaaaggtagaggcccctgtgtcattgctcctaacatggtctgcagaaaatgggagaggtagctggagttactgccgtttgggtgactaaagaactctcttgatactttggaggaagggtgagggggtgtttgtcaaggacagatggtaaatattttgatcttcgcaggctaccttctttgcactttcggctactttagcatggcagcagtcatgtgaatatatacatggtaggcacagatgtattttaataatgttttgttttcaagaaaagacaacaggttatttcagcaggatttttcagacaccttctataaagcatggcagcatagcttatcttgattattttcatctgcagagccaggtaaataagccctggcgatgcacatcaccaggtttggaacatcctggtctcagcactgatccataacagtgccacctcgtgtcaagccgagcatctgtgactggaggggactgccatgcccgcgtgtagcctctttgcctcaaagtcttgcagacatcgaggcctgcaggaaatgggggttgtgcgaaagagttggactctgtagctttagacagagctttccattttggaagcagcgctcaagttttgtctgtgggtcttgctctctaattatgcttccctttcactgaggggtgtggttagtaccatacatgtgggctccccagcaccagcctcatgctggctttctgggagggcttgattggaccctttccagggctgatgttccttttaacacaagggtatgctgtgtgtgagagcgaaggcagaatatgggaggtaggcctgtttgggctctaaacaaccctcatgcttatacaatctagctcacgggtgggaagggaggttgtgggttgataggatgagtctggggctgcaagtgagatgggtcagcaggtaaggacatgtgctgctgacacttgataacctgagcatagtccctggaacccacagtgcactcctcaaagttgtcctctgatctacacacacacacacacacacacacacacacaattttaaaaggaaagggctgaggctactaaatccagttcagcaacttactgggtgagtgaccctgggcatataatttaacaactctgaattccagttcagtcatctataaaagaaagaggccgacagcttcccagctctgttatcggatttgctttgacctatgacctgggctgggggcagggggacagggaatgacagacaagagtctacggagatccacaaccaaattgaaaacctgaagggaaaagccaatcagagccatgctataatttcgaccagtgttttacctctttcttgtttctggctacaaaacacatagctgcctcaccaaaggccagaaacagtggggccaaccagttacagactggaagctccaaaactgtgagtcacaattatactgttggttatgtttgttatcgtgaaggaaatcgactagtaaaaccaggatgtggaaatacaggatggttacgttccctcacacaaatagaacgtggacatacaagatggatgcttttcttctccttgggtgtttctgggctgaagggtgacaggtgtgactcggggctaggtttctgagttttctgtaaacaggggtcattgggtatggctttggccctggcctgtcgctcagtaaggtccactggaatgagaacctggggaagccagattcagtttggtggagccagttatgggccggatgaaatttggtgttaccaggattcctggctctgaccaaatactcatcaccctcgtgcactcccactgagagaaggagggtgagcagcctctcttacggcctgtgatccggagtctctgctttctgccaaggtcacagttccctaggcacagctgtcgggggatgggatccttgcctctcctgcagtaagtcagtgaggcaaagacacttctgcttctagccaactcagctcatcccatactgaggcctcctgcccttgttcccattttatagatgattgtttgagagctaaagggtttttaattaattaattaattaattaattaatattattttttacttagtctctttatatcccactcactgcccctcctggttaccgcttcccataagccttcccccatctccagtcctcttctcatctgagcagatgggggcctctgtgggtattttctcacactggcacttcaagtctctttgtggtgaggcgcttcctctcccactgaggccagacaaggcagccgagctagaagaacatatcccacgtacaggcaacagcttttgggatggttcccactgcagttgtttgggacccacacgaagaccaagctgcattcttctacatgtagacatccagttagtccagcaccatttattgacgatgcgttcatttttccattgtatggttttggtttctttatcgaaaaaagtcaactgtccataggtgtgtggctttgtatttgtgtctctgattcgattctattgatcaacgtgtctgtttctatactaataccatgctgtttttatcactattgctctgtagtgcagcttgaggtcaggaatggtgattctcccagaagttcttttattgttcaggattcttttggcaatcccggggtttttgttttgccatatgacattgagaattgctctttcaaagtcgataaaatattgtgttggaattttgatggggattgcattgaatctgtagattgcttttggtaagatggccattttcactatgctaatcctacctatccacgagcatgggagatctttccatcttctgagatcttcttcagtttctttcttcagggacttgaagttcttgtcatacaggtctttcacttgcttggttagagtcacaccactatattttatattatttgtggctattgtgaagggtgttgtttccctgatttctttctcagcacatttatcctttgtataaaggaaggctactgatttctcggagttaattttatgttcagttgctttgctgaaggtgcttatcagctgtaggagctctcagatagaatttttggggtcacttaggcatattatcatgttatctgcaaatagcaatactttgacttcttcctttccaatctgtatcccctccatctcctttagtttctcctcttgctctagctagaacttgaagcaccgtatcgaatagatacatagagagagtggacagcctcgtcttgaccctgattttagtggaaatgctttaagtttttctctcagagagttaaaattttaaagattaaatggccatggtagatccatgactctaaccgaatagagggtgtagagtaatggtcatttgtcatctctttgctgtaggatctggaagacgattatctataaagaaacaggtaatgccactacccatttggcttatgtgtggcttacaagagtcccacgatgtatatggcccacggcaagtgctcataaaaccttaggtattattatgatgcactttttaaatttgttctaccattcaggcttactgtttttattccactattatgaaccaaactactatgattatctttatccaaatggtttgttttctcctttgtatcattcccttgggttgcagtccgagaaaagcgttggcagatgaaaagggatagccctccttttggctttcatccatgttgtcagacagctctgatgtgggatggttttctcagaaggcagctgcgttagagactcagttctaaggtctgtgggtgccgggtgtgagcacctggggaaaatggggagaaaactggagagagaacagctggttggggcctggagttttctgcctcaggcctttctggcaagactttactcaaatcactgtcttcaggagtttttcctgggcacactctccatgatgccagcctcactgattttctccacaatgccagcttcactgattttctccacaatgccagcctcactgattttcatgtccttgctgacttattttcttctcatcttaagctcttacccagcatgagtttattttattgacctttttcattattattattattattattattattatttctccttttccctcttacacagtgaactcattgagaccaattttttttaaaatacttaaaggttacgttgatatatttacttattttgtgcatgtagggatgcatgtgtaggcgcatgcttgctgtggtgtgcatgtagaggtcggagaacaacttgtggttgttctctccttccaccatgtgggtcctgaagcttgaactcaggtctttaggcttggcagcaaatgcctttacctgctgagccattgtgctggcctgaggcaaagatatttaaaaaatattttgatttattttttgagaaactcacatataaattatatatatatatatatatatatatataaaaatttgtctactcaccctcccccaccccacccccagtttaacttcttccaactttgagttgctgctgctgttgttgttgttttaaaataacccactgagtccaatttgtggtacccatatacaaataaatacaaataagtgtgtggccatccactggagcatggccaatctgcaaggggccacatccctaaaggagactgactcttcatctcccagctcattagcccccatcccatccacgctgggtgttgtcttgcatggttttgtgcagactgccacagcggttgttatgttcatgagagtagcactactgacatgtccagaagacactgtttgccccagaattccccaccctccagctcttacagttttcttcttttctggagtgctccctgagccttggggtagggatgtgaatagatgtcccatttatgaccgagcactccaccaacatactggatctctgccctttgaccattgaggaaaaggtccatatgcaatagtaaaaccatgcccttggtatagcagcaccagcacacagcctgtgagagttgaatattgaatatatgaaggtgttgaaaacttggtaagaagggtaaacatttaaaagggccaaagctgttattatctttgaggggtgttactctttattggtacttaggcccctattggaggctactagggctggacatgaatatccctggtctattaggggttgttttaggtcttcattactggtaacaaactacctcgaacgtagtggcctatgctctgatttgaaaagaagagggaagaggtgcctgagtgactgagatggctagaggctagaatcatgtgagatcttcccttatcaccctctgggatccaggcatgctaagcagggaagctatcaggacatcacctgcctgaggcctgcttgaggcctgccttaggcctgcctctgaggcctgggtttcctcacagcatggtggctgagtttctggaggaggtgatcccacagggacacatttatttagtgagacccacgtgagctttgtgttgttttcctgcccagccttagaggtctcacactgtcacttcttcagtagtctactggtcaacacagctataagcctgctcacattcaaaggacaggggccaaagcccttctttaattgtcatgacatcttcataacaggacagttcttctctaccttcatcttaagtgagtgagcttcattaagacagggtctgccatggttatctaacgagttatctggcacataatgaatactcagcaatgagaaaacaagggtgtagatggctttcatggatgtcttataacacttgtctctctaggatggccttgcatgcctgtcactaagaggtatgtggttagtgtcaggtataaatgaccaaacacacaagatgattgagtacagcttgggggaagcatatggcaatgaaatgtggtcttcatggccttcacaaccaacagctgccatttctggctcctcaacatcacccattttttttaaccacttcctgccatccattctcataagcagcattggagtgtctacattacggcagcacctgaggtgaactcagttgccccctgtgacaatcctatgagatgaggctattatagtttggagcgtgtgtcttccaaaaagaaatgtattaaggctgtgatctccagtgtggcttgctgtaacaaaataccctaacaaaaacagctgaagggagaaaaggattaatttgactgtcagtttgagtgtatagtccatcacagtggggaaggcaaggcaggcagtatgagtgcgaagctgctggccacagagagtcaggagcagagagttatgggtgcctgcactcagctaacttccacctttttatgaagccgaggattccagctctaaggatggttcagttcttgtttggatggaccgttccctcttctcaattaaaccagtcaagataattgcttacagttgtaccccaaaccaatgttttctagataatccttcatagatgtgcctgaaggcttgtctctttgaaggttccagatctcgtctagttgacaacaaatcattaattggttagaaagacagtggaacctttaagaggtaggacctaatgggaggtcctttggtccctgggcatgtatctttgttggtggcagtgggactccagccccgtctctctctctctctttttttttgtctccttcttctcttcatgaccatgaattgagtgaattgtatccaccttgggcttctgctgtggtatgcctccacaggcccaaagcagcaatggggccaactgattaagggctgccatctttaaaactgtgaggcaaaataataatttttccttttgtgttgatttccccaggtgtttgatataaaagcagaaaactgatcgggatggttaatatcagtcattaacttggtgagatctagaatcaccatggagactggcctccgggcctgcccgtggaggattattctgattcatctaattgatgttcgagtagctgaacgttgtgggtggcgcctctctgagggcagggactgtatacaacaggagacagtcgggcgcaagcattccccactctctgcttcttggcctgtacaatgtaaccagagccttggagctctgctgctgtcacttgcccaccttgatggattgtgacttcaggatttgagccgagaaacaccctttctcccttaagttgcttatgtcagcgtctcccccaactggtcaagtatggcaacagaaagcataaccgacacactgacacatcgatggctcctcctagtaccccgtgtttcagatgaggaattagagggacccagacacaggaggctgcagcaggcgcttcctggttcacagttgggagaactgtatagtaactgcagggccaccttggaagatccctggaatgggttgacttgctgtttggtacttactgttctttcaaatgtaaaccaggaagggggatctttgcttttcatgattttaatgtacaattagtatcctagaaatttttcagaaaataacccccccccccccgccccgtgtcttgctctggccctagttcagctaaagtattaattttagaagaggagacatcaacactacttaactgttgtgttcgttgactaatttgtactgtttcaggctacaaccttgagggtggaagctcactatgagttttaatagcttatggtgaggtgacaacattttggcctcagactaagaaatatcttcagacaggcttttttttttttttttttttcccagtgccaaaatttaaccagctggaattgttttccatctcagtcagtctttctaagtcaagcaatttgccttttattgggaaatctgcattttaatgtatagatagaacattctgtccttggctctaggatacaagaaactgggtctttgttttattgtctgatctgggtgtcttcgtaagggatcaaataccagcaagtttgaagcttaccagggagaggcaactgtccctcccagtgagactcagagcttgtgaaaggagtgggcgaaagatccacaagtcagggggaagagagcaccaccgctcctcgatcctcgacagcatagctcttgccatgccctgatctggagccccgtgacaggctttcaggatgtgagctctgctctacaatggagagttccttagccacggctggctcactgacctgcttcaagtcatcacttcagagagcatgttcttaactcctgggacgctgctcactcagcctgtcactattttcatcccaccattgtatctgaggttacctaaagcgccacgtgttggcaagagaccttcacattctttttaactgtgtttaaactggttggagagcctgtcacttcaaaatgcatgcatataaacttactgtctctgtggcccaagggcacagtattggcaacagtttgatgcccgtaccttgccaaaaccagacaatgagagtcatttcaatgctgggccattgtgagtcaccagaggtagtgattctgtgtttaaaacctctggcgatgctggctgtagttccaagtttttagctctgtgacccttgtctgccgttgtcacctttcctcactttttaaatattaaactagttgtctttttctttttgagttctagaaactctccaggtgatgctatttggacagatcttcaagaaatctcgtgacacagttttatcttttgaacatggaattgatatttggaaatgtttgtcacttgatggggctgagtcagaatgaacaaactaaagcagtgttattttagtaatcatatgtttggaactatgtaagcctgtcctagatgtggcatctgagatgaccaagactccatagtgtcagaggggtgcctgggatgcacaattaactgactagttgagaaagctcttgaaaatgtcacgaatgtgcaccttaaatattttaacttgcagcagataatatacagctttgcagactttcactccgagggaacacgttcgtctgtgggtttgttgacaggagtcaacattatatttcttgcataggctgtgcttttaaggcatttaaccttttaaagccatcagagcacagaacacttatagttcttataattttttcctcatttttaaagttgtctcaatcaaacataatttaacaatgattctgaataattctatcattcagtgttcagagaaacaattcttttgttaatatttaatgacttcatagactattaaaattatatgcaaatttagtcatacaattgcaataataaatataaccagcatagacaattttaagcctgttgactcttggtaagcacatagctcgcttgcaggcatgagatgtgtgggatagattagagaactggagattagcctattagtcttcaacattcaacacaatgtggtatcagtcagtatcttgcctgtggggagtttagtcatcctagtgttgttggcttctagggtaatcctggtaagtgtaaggaattaaaaagagattttcctgtagcttctgtggaggaaaggaaacagaagagcaaagaaatagactgcaggatgaaagagaacatttgcaacctgttacttcagcaaggggttaatatccagaatagataagaaacccaaaagactcagcattaggccagacttggtagcacgtgcctgcaattggaagtcttgtggaagaaggctgtgggtttgaggcaagcttggactaaactatctagtgagacctaatctcagaaaaagaaaagacaaataaagaaaagctcaatagcataaaaaccactccaggaaacaagtcaatgacatgcatgaatacttctcagaagaagacatgcaaggaaggagctggcaaatatattaaaaagtgtccagatcattagtcactgggaaggtggtgcaactggaaaccatgagctatcctctcctccagttaccatggttactggtacaaagactagagagagcatgtgtagtgaggatatagagggggagaaactcttccacactgctggtgaccagttaagtcatacaacctgtctaaaacagtatgaagagcctgtataaagtaaaacagccacaacaaaaactagcgtgggatccagcaagcccaccaaagggtatatatatagcctaaggaatcttcgaggtgtctgaacttccatgcttttgatagcactatttccagtagtcaagatatgcaaccacacaatgaattattatttagctctaagaataatgaaatcgtgtcatcttcagcaacgtgggcagacctggaggacaaatgataaatgaaataagtcagtcattgaaagatatatattgtgtgttctcaatcatttctttttattcatttataaggcaattataatatatgataattcatgatatgtttcaaaatacctggaagagttttgagatccccaacacatagaattgataaatatttgagatagacatagttactttgatttgattgtcatacattatatacatgtattaagttaccatgcatatctctaaatgttatatatcaattaaaatagagttgtaatggacatttaaatctgagaggttctggaactttgggagacggggcctactttgaaggttacacctgccccttccttcctgtggtgcctcctctgcttcctggtctggaatgatgggaacggcctgcaccacacatccctccctactccagggactgaactcttcctctgtgtcctgcccaccttgatggactgaaaccctctgaaactgtgagctgagataagttctctcaattctttctgtcaggtgtttggtcacagtgctgtgaaagtcacggatgcaggaactcataaatggtgtcaaaccaccttcgatgtctacttaagcttacccagggatacttccacctaagaaaccaaattgttctgaataagggcgggcttctctccagctaagatttaccgggtgactgctgtgccaaggatgggaacctgtgcttaacctgggttactttaaatgctcataaggattaggcatccttacaacacccagtgagatataggtgttgatatctccactgtaaggatgagaaaacacacagccagcaaataacagaagcaggatttgaaaccagccaggttgatgcagtgacccaactctcagccacagcatagtctctggaaaagcctgaggaagtggacgcaacatcttatgttgtgatgtaatgtgagctgaggagacggatagtgcatgcctgcaatcccagcactggagaggtggaagatgaaagatgaggagtgattgtgttgtcaggtctgaatacctgcatctaataactgaaggtctgggctggagagatggctcagtggttaagagcactgactgctctgccagaggtcctgagttcaattctcagtaaccacatggtggctcacaatgatgtgtcatgggatctgatgccctcttctagtgtgtgtctgaagacagctgcagcgtactcctataaataaaaacataaatcttaaaaaaaataactgaaagtcttgggagaggccaacctaaactttcatattcagaaagggaacagaaattagttaaggcagtaaccttgacttctgtcagatttcattcattaacctggttttctacggcctagaactgatttcacattctggagactcagattaagaacataccaccaccctacaggagctcatagatacagatgggatatacaagaaagctgtaaggttagagagcgctctaggaggacttcactacagtcctacagatgtggatatagacatttcaggatatcaggttggaataagctgttccaagtaggtcagtagtacagagaggaggtatgtgtgccacagcagatgtgtgaaggtctggccttagatgagaccggcgaattgaagaaaggccatgtcataccatttttggagactttgaacttaagcatggagagcgtcgaaaaccatgacttcccatagggaagcaacaggaccagatttgctcagagatcccttattaaaatgatgaatggcttagagacagagttccagtggactcagatgatggtaggggtgctaattagattactggggtaattcaagtgaaaatgagccctgatcaaaagccaaccaaaagaagctttgcatgagcaccaggaacactggattcaggccaggagggcagtgtggcttacatctgattctgctgctaatgagctggttatctccatctctgagtcttatcaaaatgggggcactttgccctctccagtttgtgtcctaggaccggtgagcccgtgtgaggacaagcattcaaggaaggtatctgaagccagctgggccaggaatggtttcagcatgggtgagaagatgcggctggaagtgaggcctgtggctagctcaggctgccagaggattatgtgagagataaaggcagctggggaaagaagagcacgctcacatttcaggagaattagctccaacctttgattccttagcacactgaggcttctgtactctggagatgtcagttgtactctatgttactttcttattcttatttccttattattaccacaggatctgggaactgtgacaagtgatatacatactctggacagacagacagcttctgcggcagcagcaactcccaagccataggccctgagaggactcaaaagtccccagtccctcagataaccttatgcctctcgttgagtgtcacagggtcttagtcccagacatagaggtgggaagtaaactggatttgagcaaggggccaggctcagcatgggccacttggttagccttgcccctgggaagaaaactttgaaaatgtggtcacagccataacccatgacatacagtttttaaaatacaggtattcttggatttcaagaatagaaaagacaaacaaacaaacaaacaaacaaacctaaactctggagtttggagccatagctgagctccagctttaccctacacagaccatggaagtcactgaacttttctgagcgagttccctttattgaaaagtgagaacaagcttgcctgccttgcatgactaaagcatgggggagtgggagagagagacaggctagaatgatgtataatgacacacatgtatgacaatacagaagcatttgagtcgatagtatagtaattacttttcctgccactgtgacaaagttacagaatcgccttttgtgagggcagggtttcttccagtttacagtcagaagtgatgtagcctgtcctggcgaaggcatggcagcaagagtgtgaggtggcagtcacatggcagctgcagtcaagaaggggagagcgatgaattctggtgctcagctcactcttactttttttaaaaaagatttatttatttatttatttatttattttatatatatgaatgagcacaccgttgctatcttcagacacaccagaagagggcatcagatcccattacagatagttgtgagccaccatgtggttgctgggaattgaactcatgacctctggaagagcagtcagcgttattaaccactgagccatctctccagccccactttcacattttttattcagttcagaatggaacggaacatcacatggaatggtgcagcctacgggatgggtcttccctcctcagttaacacactacctagagactacctctcagacacacctgttggttttcttccatgatgatttgcattgcatgaagtggacaatcaagatcagccaccacgggctgtgtagctaaatggaaagctgctagggtaggtttggcaaaagcagaagtaaaatgagcacacacagagagaaacttatccacacgttgtgggtttggggctgaggttgacatgcctcactcagcccagttacctgctgagacggttctggcacactgcatgggaacagtgggtgttatagagcggtatgttttggatgacatgagctttctcaatttagttcttaaaggcaaagagggtcccctttcccaggaaatgtcttacatgctcaggctctccatttatctgttgtaaactaagttgtgttgctttgtgttttacaacaaagtaaggactacagcatagacgctggatctgcccaggctcaggtgtactgtgttctgctctggaaagaactgacctgtagtttcaaggtccagtgcatttcagagtcccttcttcccacttttcaccccacagtttctacttgcaatgttcacacttgaattaatgagaacaattatattaattttatattcttgccaaaattccatgttctagttgacttactcagtaacatattcaggggcgaaatgatgaggactctcgtgtctagggtacctggggactattcgccttggttacatttgaggcctcaggctttatggaggcaagaatgcctttctgttacaggtattaataactgacattcacaaattacccttcctttaaaaaaattcactttggagagaaggatcaggttcttaatttacattttaaaaaccgcatctatttcagactcttatctctagagcacaaaagaaaagcaagaaaaaatataaatggacccaagctcacttcacgatccctctaaagacgtcaaaatccaaagatgttcaagtcccatatattaaatgtctccatatttgcatgtaacctgccctttctacatctgttaaaccatctccccttttaaaaattttgtgagtatgtgtatatttgtgcacgtatttgtgtgaatgcaggtgttgtgttgagtgtggaggtcagacggcaacctcacatgtcgctcctcagcttctatagtctttgagacagggtctctcttttgttatgtgacacagtgtgcgccagactagctcatctgcgagcttctggagattctcttgtttctgcttctcatctatccacagaagcactggattggcgattgtgtgctactgtgccagcttttcaatggctgatgttttagttatcaactcaacacagtctagactcacctgggaagggagtctcaatgagggattggttagatcaggttggcctttgggcatgtctgtgggggattatcttgatgatattaactgaggtggggtggcatgtccactgtgggtggcaccattccttggggtagggattcaggaatggataatagcagagaatgtgctctgagctctagtagacattccttcctctttgttatggattatagatgtaatattcttgcgcgcgctcgactggccaggaagaatgacgctgcaacaggatccttctgcacacgtttattgggagagcttgattgtagaggcgaaaaagacctcgagcccagaactggtgctgcttttataggcctaggaggggcgtgtctcacaccccgattggttatgcactaagcctcatttgcatgttcctcatctgattggctactctctctcagtaccttacagaacctcattatcatgcccgggccaggcagtgtctttgcaaaaaactttactgcatatgtacacattggttgtttgtccaaacttatgcgtggtggccagcagtagtcagtgccactctgcaacggcacatgtggcttcccacataatatgaccagctccttcaagcccctaccaatgtgacttttcctctgtgatggactataacctggacctgtgagctcaattaagccctttctctcccatgttgcttggaatattttatcacagcagcagaaagtgatactagacaagtaggttccggggatacaatctggagtctgcatgtgtcctctaatcacctctctttttaaaaaagtatgtatttgtatggtgtttgtgctcctcaagctctttacctacagggccacttccccagccctcctttaagtcgtctctagactttacactgtattatttaaggaataataaagaacagaaagaaaaactctgtgtgttcaaagaaactcaattttgttttttgttttttgttttttgtttgaccaaatccatttgaagatgtagagagagaagggcccaactgtaagtaaatatgtggatcttaagaaatttccaaaacagtcctgtctctgtccctgcagagcaggtgtggcagaggctcctgtgactgacagggcacttcaggcttgacccagatgtgcttggtgtgtgaaagaaactgcctagatgaggttgtgggctgaatacagattgtaacctaggaagtttgtgggagtaaggaggggaagtgcctccgaagagaggtcttccgggagaatatgagattagttgaggttcaccgaatccctttgttgcttaattgagaggcatatttggagggataaacctctcatgtagagctgagcatcccagccttgttgccatagtaacagtactcagacaggcccaaaacccagaaaacaccaggtctaagggattctgttgaagccatggttgttccttagaggtccccactattgtattctactaggcagaggcgcaaaggctttgaatagctcccttccttcctctttctagccatgggcttattgctttgttttcttttctcctcggactgagaggcctctcaaaatgggtacctccctgcagatggagctaatcgatattttaaagaagcacctttctcaggctcgtttcttttctggctttctagaacttagcagaatctccagcaccaaccatctttcccccattgcagtcagaacacgaacctgtttgcagtgagctatatcatcccttgcagtaagcactcatttcgctgtttcttggcccgtatctctttgggcatggctatccttcctacctcataggggaaagggtaaaagagcccttatattgaagctaacttgtagggcctggttacttatcatggtcactaagttcacctggattccttaaactgcactccagtttacaaagatttgttaagagacagttgctccttccagtctggcttaattgattctagcatgatcatcatctgtgtggcctttctatgctaacagtctggtttctagacttgaacctgttttaactcaagaactcctgagactgaattgtcaaaagtagggtggcgaggcatgtttttatttcgtcagtactcttggatcttggtaccttcctgacaattcatgtcccataggacttaacagcatactccaagtacctccaaccctctttgctcagtatcagagtgtgtaacaccggccatagcaaggataactgcattctgggaatcagctaaatctgtattagacatggtcctgcccgtggacacttgcagcccagtgacagagtggctctaaagtgtaaactcttccacagagggtcctttgtgctctgtttttttagataaggaatcccggcgtctaccacagtgttaattagcacttattagattctgctaataaatatgtaataaaaatgtactgagtaaatgaatgagtgtataaaatgtgcacatataaggtcaaatggggagaagactggacaggggacactggacaggggagctgcttagaggtgaaatattggtagaggaaagcaacagaatgagttgaaattggttggttgttagaatttgttgagatttccattgttgccttttgcaggcttgtcttttttttttccattttttattaggtatttagctcatttacatttccaatgctataccaaaagtcccccatatccacccacccccacacccctgcccacccactaggcttgtctttgaaaacattttctgttggaaaataataatgtatattttaatcatcaaggaaccacaggattctatacatgtctgttagatcaagcttttatgctcataataagaagtttgtgttttcacctaagtaattgcaaggctgagctgattccaagatagtttgttgttattttgttattggggctacagcgcctgagatactgtttttaaaatcaatgccagtgctatgatttacacttttctttcttatttatttatttatttatttatttatttatttatttattcattcattcattcatttattttatatttcagtcgtagcccccctccctcttctcctctcagaccctccgttacaaatcccttcccctctgaggagaaggggaagccactcttgggtaccaccttgtcctgggatatcaagtcacagcacgactaaatgcatcctctcccactgagacccaaccagtcaatctagctactagaagtggactccaatggcaggcaagagtcagagatagctcccgctccagttgtttgaggacccaaattaagaccaagctgcacatctgctacaaatgcttagggggcctaggtccagccccaacatgctctttgattggtgattcagtctttgtgagcagccatgggcccaagttagttgacactataggtcttcttgtactctccatgacccttcctgctcaagcctatccctcactcttccatatgattctctgagctctacttgatgcttggatgtgggcttttgcatctgtttccctcagctactgcatgaagcttctcaggagacagttatgctaggcttctgtctataagcacagcagagtaccattaatagtgtcaggggttgattctctcctatgggatgggtatcatttacatttttatctaagtctggttatcatcatgtagagtgtctcttttccgattaactatatgttaaaatctattttgtttaatattaatttagctctttaatggttagtttttgccctacatagtttcccagttatttcttttaaatgtctttgtgtgttttagctttatattctggagaacatatagttagaatatgtaggataaatagctagatattattatctattataatttgccttttaaatgataggtttggtctactattgtgatttgtaatatagttggagttggtatggcatgagtttatgtagatggaagaattggtggtgatcatcataggaaacaatgtagtataaccttgtaccagaaggtaccaaaaatttttcagtttttccatcactgcctaatcaataattagatgatctacaagttttaacccttaacttgatacaacctagaatcactagaaaagtctcaactcagctattatctagatcagattggtctgtagacatgtctttgaaagattgtattgattatttattgacccattgacccagtccattgtgggcagaatcatcccctaggctgggccctaaactgtagaagagtgaatacatctttctaggcatcaagcagacaacatggatgcattcttttctcttgttcttgatttttcccaaaatgttgggttatagcctggaattgtaagttaagataaacttctccctacatttgcttttgatcaggaacttttatcacagtaaatataaacagaaaagtaactaaatccaatgacatatactgacttttatcttattagcctctgagaagcaatgttatatcttcttgatggtgttcagtcttcttgaccagaagcattctaactatttaggtggtatttaaccagatcaaggtggttgcaggaggttaaaagggagtggaaagaaaattgtggcaggaggtgttagtgactcactgaaaggaaggttagaaatagggtggaaagagcagtaggtctttaatcatggatcttcaagagacaagtcaggaggcagagagagaaatgaacagaaaagatattgttgaatataaatgcagaaggactaagctgtcacttagcttcttttgagtaatgcagaaatgtttgtgtgtaattgtgatatagtttagaaatgtgtacacatcacctttgtggtagcaacaatcacctttaatcccagcattcaggaggcagagacaggtggatctctgtgagatccagcctgatctacagagagaattccaggacagccagaactgtgcagagaaactctgtctcaaaacatgctcccctcaaagaatatgtacacatctctgcttatttactaatgtaaagatagtgtcatggtttttaaatgtaaattaatttcacacccttacttgccattttgtcaacattcattaagccaactggattttcttttcctacacttccttagcattaagaacttgatgccctacagtgtccccaacagatcttgtccagggcctttaaaattcattttaagagtccaccactctaaatgggaaacaattgcaagggcccagagatctgataatttgaagtattttcttcagttgagttctgccatcgtgtgaccagttctttcttacctgcagtcagtactttgctacagctctgtcacatggctgatgtctctcccatgtatctttgttaaaagtctctggatccttcatgatgcttgtgtgattcagacatgtcttcccaggtttctttgtttcattgttgtttgttgtgtattctggctagagcaattaaaccatgaatagaaattcaattatgttagatttttggggagaggtttgtccaataaatctatcacgtgctagtagtccctgactttacagtgatttgacttaggaactcttgactttatcattatgtaaaaggaatacatttttagtttaaaccatagctaaaatttgaatgttatgttttatattttcaatttatgattggacaaatcaagaggcaactttacatttttatgcagatttccaaatgttgaatcaggcttatgtttctaggataaatcttacatggcaatgatgtatttttatattgcagagtttagtttgctaatattttgagtacatatttataatttaatttatatatccatgaagaatagtagtctgtagttttgtttgttagactttgttaaacatctatatgtctatctgtctatccatccattcatccatccacccatccatccatctttctatccatccatccaaccacccatccatccatcatctatccatccatcatccatccatccatccatccatccatccatcca

SEQ ID NO: 415 - DNA, 32306 bp, Rattus norvegicus
  source 1..32306: mol_type = genomic DNA
gctccctgccggctccgtccgctctgtcagcccgctgctcgccgccgcgcagagtcgccacctcggtgcttgcagcccgtccagccccggaggagcccgtccgacccgccgcggagcccgacgtttgcagctgtgcgtcgccgcgcgggtgagtgagcctgcccgcgcttttgtcctgccgcggtcaccgggttcccggtaggagcagctactaggagcggcgagggctgggctctgagggggacactagcttcaaaaggataactcctctcccagcccggcctttgcagaaggcctgatgacgaccgggttcccctccttccacctccacccaccagtgtgatgctgggacgtggagggttcgcgctcttgcaccacacggagcccgcggtgcttcgccttccttcgggttagccagggcgccttctgagggattttgttagagatgtctgctgtagggaagtttgggatagactgatctccaggagtggcttagatagtgtgctcctctctgtatcttagggatctgaaactcttcaaaacccaaaaaactaaatttccaagactggtactgcagatgggaagatatgttggggagaatgtttggactttttctttttctttttctttttcttttaaataaaattgaggtggaaatattttgctgtatcataaagagaaagtccccaccccgtgggtctgaagggaatacaattagctattgtgctttccgggagctgggtgggggtgagggtgcacctgggcagtggacatggatgctagagcttagggagctggctcaccatccctttgctcaaatgcaaagaatggggtaggtgaatttccccttctcccgaagcccctcctacctcagctctccaaagccggcttgagagctagttcctcctcccagtgatgtgatgcccttccttgccttggaagaatctttgcttgttgttaaaatgcacaactctactctaaagcttcaggtatccacacaccagtctcaggagcgggggtgggggcggggaagtgtggcggtcctgtaaccagtgttcctaaaacctttcgttcccctcagctacctttttttttttttttgtctgtcaaattctttacctttgcaactgttttccactgtcttccctgttttcttagccttctctgttccggcccagaaagaactgtggagggtgatgccttgacttttgctgccctagattagtcaaatggttctgcctgggtccagagtgaactcgttccagtgttcccaccctcagggtccaaggacctgagctaaggttagaaagaaccttctcgaacatttggttctgagtgggagaatggatgtactctggggacttgcatgggagccttcgatgaagggatcatacagcactaggcatgagcttggagaactacccttctgtgccacaggtttgtactagccactcttaagtcgtgtgtgcgtgtgtgtgtgtgtgtgtgtgtgtgtgtgtgtgtgtgtgtgtgtgtgatttgctgaccccttgatcccgaaactgtttcctaggtgctagatctcagagaacatgtatgcaatcaggaccttgggatattgctgatacaactagtaaaaccaggtaggcttacctggaacacagtagacagacagctgcagtcactgtagagcacggaggagttttcaaagaaggcttgtctggctctgggtatgtagagtcacaggtcacaggtcacaggtcacaggtcacaggcttttgcaaggtacttggtggaggaagtgtgttggtcctgactggtaaggtctctttatcgaattctctgggaataccaaggaatactcactctcaagaaacacccctcaatttttttttccttcaaagtataagattaatgaatggctacacatccttatttagtcccatttttttcccttgtgaaatgcacctaggtgctttgttgtttcacgtagtggggtttgaggatgaagcatctctgtccacgtaggggtctcatttagtctcctgagaaaaatcgttttgcagtgcacacagattactcgttcctaaaagcctcctgttggccaggcgtagtaacacatgcttctaatctcagcactcaggaggcagaagcaggaggatccctgtcggtgcagaggccagcctggtcaacatagaaagttttaggatagccagaactacatagagagaccttgctaaaacaagacaaaccaccctgacaaacagacaacagcaaaacccctcccatcctgtcctttctgcacagctagtgaaatttagagaacaacactgtataaaggaacattttccaacaaaagatgtctgttcaatatagagcaattaaaatgttttgagattataattacatttcccctttttctctcctccccctaaatattctccgcttttctctccatattcatgacctcttttttcatgaattgttagtgtgtgtgtgtgtgtgtgtgtgtgtgtgtgtgtgtgtaacaccgcctccacctctggccaacaaggggtatgcacagagggcaggaggaggggccatttgcacggaagacttacacacatggatgcttgactcccagtaggctcaattggctgtcatgggggctcagaaccaagaaatcatccagcagtcctccagtctgaggacagagcaatgtccctgctgtgagccccagcgtcatgtgacttttcctttccctttgccctctcagcctcctgtcccacctgagtgatgaggtgccaggcagcagcctgcctgtgtcacatctttcccatgtctcccattttgcagggagctctcattctgatatgaattttagctgccaacctcttcccccaggtaaagctgacagggtgagttaatcggagctcttatgcgcatgtgctcagtaggtcaggaggtcatcccttctgccttggtaccagcacctcagatgccagacgcttgagcagtgtggcatgatggccagcctagtggggctgggacacaggcggggtcagcaggaattgctgctggaagctcagggactgagggaggctgacttttcagatcctccctgaggtcatcctttcaacgccctcctgctcactgtccctgggtgtctgagggtgaatgctcacaatgggaaccccactagggagctctgggaatttttgtgtagatccagcttctcagatttcccagtgttgtcccatcccccactcctggtaggtctgtgccctccctcccattctgcccaccccagctctgctcctccctcttgggtcttgagtacagagccctctggagacccaaagcccctaggacaaaggaaaggggatgaggagaggatttccctttctttcagatctgcagcttgatttttccccctggccctgggccctcagatcgaatgttaagccagggccttatacattacttctcatcatcgtcagggaacactggtaatttgggcacatactgaggtaaaaaaaatgtagctgtgtaccttttgtttccagaaattaatgattttttgttgtcgtcgttgttggagtacagatagttcatcagaaaactgacaggaggcaggtgaattttgaactttaaccatacgttcagatctgtcctgtcttatttactggcggggtgttctagggtacagtagtgtctttatctgaccatgaaagggcagtttcaaaaattaaattgccagggctgtaataattcagtcagtgaagtgcttgcctcacaagtgtgaaaacctacgtttcatttccacaagccaggttaaaaaacagcttctgtggcatgggctcacaatcttagcaatggggaggcagaggctggggatccctagggctcatggccagcctgcctaggagccagacacctactaggtgatcttcaggcctatgagaattcttacttgaagtacaaggcagatggctcctgagaagagacacctacagttgacttttagcttctacatatatgcatgtgtgccaacacacgttcacgcacacatacatgcatatatacatatacgcaaaaagtgtatgactaccaaatggaaaaagagaagttattactataacacattgagccgcgtacatcatgcccatggaataactgtaaatgaaccagcaaatgtgattagaaatctgttctccacctagttctgtggatgagtagaaagcaaagggtcttaggcctcctagactcgggtctgtatgaggaaacagttgccatggatgaaataaacagaaaacagcaacagcaccggatttcaaagtgtgtaagtgtgtaagacattcaggggctgcagtgtggtggggaaggcctcagacaggaagaagagagcagggtggatgtttggcaggagagagggtcaggagcacttggctccatgtctgagagggctcagccccttctcagctggaacctggtgggacacctttgaccctgtggcgttctcccaaccgtgcatgtctgcttctcctgagatttattttgtgaatgattttcatttccgggcttgttttctttctgccgagactattccaggaatgaattcaattttatgctgagtcaaaaataacgagagggaactctatggcctcagcaggctcacaggtcccatagaagtctgctggtttctggggctctggctctcttctgtgctttgctcattgtcgcttatctcctcggtctaaactgcagggcactggagtaatggagacgtacgcgcctgaccttgcatgagcaaggaggcgtaaggagcaccgtggtggaactgaatcacccacactatctctcatctgtgctgaaaaatgacagtgacggggtgggacgtcaatgtcctctcctaaaccagaagaatgggtacaaactggccctattatccattccagttggagccgtagaatccttaaaagtcgtccttttcatttttatttttcttttaaatcgttattagattttatgggtatgggtctttcgtctgcatgtgtctgtatatcgaatgcatgcagtacccaaggaggccagaagagggcaccagactcccagaactggagttggagatggttgttagccactaagtgtgtgctgggattgaaatcaggaagagcctgattaatgcctgagcctcctctccaccctctgctttgtgaatcttaaagcacagtcgaccatgccaccccctcttcagaaacctctgccagttctggtccgtcggaataatctcacctagaaattcagaagcgcacccccaccctcactcccctgtttctaagtccacacactcacccttctgtcccacaacagccttcacctagtgaatacttccacatctctctagctcatcctcttctggaacattctccacgtatgtgtctctttgcctgttaacttcttctatccttgcctgtttgttcaagaaatgagtctctaattcttgaccccagtggaggctgcctttgacctcagcttcagcatccagagcaatctgttctcgcagagtttaaggtgacaagtcacgtattattgtggaacgctttaatgttttattttatatatttttttcatggtgaaaattttttttaacaactctggaaaatctcctagggaaggttgtggtgatgtctgttccttacagcagggttccagagctgtctgttttccttccagtccagctggctcagtgggtccagggactctctgatgttcgtttgtctttttgtttgtttgtttgtttttgtttttgtttcgttttcctttaaagctccctggatgattctgagagcagccaaaagatggggctcaatcctggttggatttttttccatgatgtcgttgtttcttcgatttgtgtattagcaataattcttcagagttagcaaaccaactctggctaggtaaaaagaaggaatggagggagagaagggagggagggggaggggagggagggagggggaggggatggaggtggagatagaagctgttcagtagaattgtttcagtgtccaagtgttttgttcgcagagttgcattctcgttccttcatcatgagtacaactaaaatataaagatccttccgaaccgtgttgtcagagttacacatgattttgagatgaaatgctggtttttacagttaagtgttcatgagttttaaatgtcagttaatccttgttccaagacagatgcttggttaagatgtaggtttgttgctgttttttgtttgtttgtttgtttttagagtatgttgtttctgactgtgtggtattttatcttgggtttttgtatccgtgtttcaaacgagataaaactaatgtttttgctttgttcacccaattgtgtataagcctccaatttttagcaccttggcatctttgaaatgagtagaacccatcagagacacttaaagatgctgtaatttccctatatttcgtcttcttctctttcccctgagccctttccctttctggatgtagaagtcccaccttcatgggtttggtttttctataaataagcagatgatgctgataaaagtcaatgtcctgaaaattaaccagagactttggaaaataaatcattagtacttaagtagttttcttactgtggtaaaatacctggaaaaaaaaatcatcttaaagaaggaagggtttactttggctcctggtctgagaaggtacagtctgttctaatggagggcatggccgagttctcgtgtagctgtgtaactgtggccgcagtgaagtgaggcctcacatctcggcaggtcagaagacagagcacctggctgggggcacacaaacctggcttgcctagaactgatggcttctaaaatcctcttcacaatgtctgtttcgtagagagcaggagactttaatttttgatcaagtcgaattaatcttaaaaatgtattgtgctttcagtgctgacgccagggtgtctaatttacatgacgtgagtttcttaggatttcttaaatatgttttacagttcctataaatatagtttggggagcttttctattgccccttttttttctcccaaatgaatgatggagacctggtatatttatgaatgagcttcctgcaccacagctgggcagatgctcatctactctgaacctaatttaatttactatccagccacgtgccccattactttcccacttagtcttgccctccctggctgcccctgctctatccctgtcctcgtggtggtgacgcccctggagactcccctggcgacctgctcattgccaatgcctcatggcaagttattcgtggtgacttctctctcacctgagcccctctctttctctttttggatgcagaagtcctgccttctcctctcccgcccagctaatggctggatcagctctttattgactaagcagggaaaaaatactgaatcaagaaatgcttgacaataacaaaatccagactgcacccagatctcggggtacggaagtcagaatctgaatacacagtgagcaaaaccatcctctaacaagttccaggttttacatttaagtttggtatggtttggttttgagtcagctgtgatacttgtttcaagacttagacgttcttttctgaataggaatgtctagttgtctactgtggtggaaagttgcccctccctgttgtacctttgttgaatattaattgagcctctgtgtgtgtgtgtgtgtgtgtgtgtgtgtgtgtgtgtgtgtgtgtgttggtatgtgtgcatgaagtatagccattagccatctctctccaataatttgtgtattgtatgatttttttccccagtgttttttactttttatatataaatgttcaacgtactttgttagattctagacttaggcattgtgtgttttcagtacaattttaaaaggcgacttttagtaaaatcttattttcagattggttattactattatttataattacaataatttattttaacattttaaaaacttaaaatttgatatatatttttttcagggatctaatgtaactgatacctaattacggttaaataaaaatacatttttaattagcatagtcttagagcctaaggtatagaatcaagcttaagtctttacttacttctctgcctttaaaatgtttctctgggcattcttttttttttttctttttcttttttttcggagctggggaccgaacccagggccttgcgcttgctaggcaagcgctctaccactgagccaaatccccaacccctgggcattcttttttgatattttttttttataatcgatcatgtattatgtgatcaatctacctcttctctctctctctctctctctctctctctctctctctctctctctgcttttttctcatttttcttgttttttttttcaagacagggtttctctgtgtagccatggctgtcctggaactcactgtgtagaccaggctggcctcatactcacagagatccacctgcctttgttaaatgagttctgggattaaaggtcaataccaccaccatgtgtgacatttaagtctattagctagtactttatttgtaaatccttagagattttcattgtagacaataatgtcatctttgataaagacaattttatttcttctgatcccgttacttgactctcattggctgttctgggtttatgtgttaggatctgcagtcttacgttatgcagagtgatggagacacacatcaccgccttagttttcatccctggggccaggtatccagccttacatgattatgtactgtgctcaaggtggggcttttgttcatgccctgtctaaggttgaggaactttgattcttttcttatattattaagattcatttttttaaaaacataaatgaacagtttttcaagtacttttttgggggggtctgttgggaatgttatacattgcttttttaaccgtttttacaatagtgtttattttgatgaagctgatacagacgatgttccttgaaaacccatgtcccaggccaagaattacaaacagaatcgaaaggagcagtttggcgtacacttctgtacgaataactttattattagctgctgatgaagattagaactttcctgggatcttctgacaataccgtcttgctcaagacactttctttctctcagtgatgccccctttggggggctgttactctccctgtacctgtcatcttcgctacaaacatgctccagaccctcagattttaaaagtagcttcaggttgaggaaagatcatttcccacagttcagttctttgaaaaatttccttctctcattgaaagtcacagtccaggagtggagcagccacgtgctggaactgcagggccatcgaaaggtcacagggaagctcccactggtcgatctttttatcatcaatccctgaaaatgcacagtcctggaaagggcgtgccctctctgtgcacacatgaaatctcttaaaggaagaagggcaatgtgaaggagctgaggtccgatcaccaaaagtcagcataacagaaaccaccaataacgaacatggaacactagaactcagattaccagatgttctaagagtcggagtgccagcattcaattttcatgttgaacaccaccttacaaaagaactattttttaaaaataaaagaggattgagggaaaaggaaaaaattaaaatataaaaagaatgatctaaaccgtcaggccccatccccctccgccccgtttgttcctaataaacttcaacctcatcttcttcccccattcccagttctttcagagtgtgattatcagcccttctctgaccttcacagagaaacctgagtgaattcattggaagcccctgtctttgacagtgtcatcctctgagtttcttgatatgttgtcatttttcactttgaaatgctgtccagcccaataactttgagtttaatgttttctccttccttcttatcccctaagtcctcagtggaaggttttgcctcctggtcagacctggtgacagtggattcacctggggggtctctgtaccacagtcgcctccggaaggcagaactggactctgaggagattgctttttttttttttttttttggttctttttttcggagctggggaccgaacccagggccttgcgcttcctaggtaagcgctctaccactgagctaaatccccagccccaagaaatgtgtatttctggcagagtaaacctacaggtatcccgagggggagggttaggccagcgcctgtagcacttattcaccagaagttccaactgtacttctgcctttgcataggttcaggctgggagcagattgtcagcccaaccaattatgcaattcaaaggttgctcccaaccttcagagaggagaaagatgctaacagtttaagttaattgccagtggcaaaggggatattttaatcaatcattttgtataatgggatcccccctgcaaaagcttctgaattgtgggacttgaacaacttctggcttggcagatcctgacgtggtggtggtaagcctggagaggcacgcaggctccaggcttcttctcacatagctgtcccgtgtctctaatccacgaggccattcctgcatcatattcttttttttttaagatttatttatttattatgtgtaagtacactgtagctgtcttcagacacaccagaagagggcaacagatctcattacagatggttgtgagccaccatgtggttgctgggatttgaactcaggacctcatgaagagcagtcagtgctcttaaccactgagccatctctccagccccccatattctttataataagcctgcgaatgtcagcaaacggtgttcctgaattcttagagtggtcatagcaaattaatgagcctggggaggaagtatattttgctttgatttttaatagctgaccggtcagaattacggcaggccctggactggcatctgacatggggaatgaatctgggagctgaggcagccacctcaggtaaatgggatcagatctgaactgggaggcaggatccccagctggtgtttggagtctcagaggcttggatggtgtgagggcaattcccctctcccctccatttggtgcttgtgttgtgggagtgaaggacaagtcatagtaaattttgtagactctgtggcctatgaagttccagcacaactccttactcgagtcctgtagatctcttatagtcagtaactcaattcggccaccattgtgagaaaacaaccagagacagtaaataagccagtgggtagagttgtgttccattgatcttcactttaaaaatggacttcatgttagatttggcctttaggtcaccctttgccgggatggtttctctgagtcctcctgcctttgtctgttcatatgcctgaccattggttgatttgccaacgtttgaaccagccttgggttctgggaatgaacctcacttggtcaccgcgcgttaacacttttatgtactggattcaacccagccccatttggttgaggatggtttttgtgtctgtgcttgggaagtgtatggatccggctttcttgtgatttcttgtctgatttcagtggcagggtaagacaggttgagtactgttccctcccagtttctgaaagggtatgtataaaattgttacttagtactgaagttttgggtaggatttgccggggatgtttataactcttgacgggatggttctgacaaatttaaaaaacaaacacaggaccaatccggttatctgttcattctagagtgcctttcagcggttggtgccctctgagcaatttgtttgtcttctctagggtagaaccttgtgtgcactgactctctttttaatgcctttaggagtcacaccaacacctcatccttcatcctggtatttgtggtttgtatgtgttctctgtccccattaagctggtttgaagctgtcttttctgtccgtcctttgagaggctcggctgttgctttcattgctttccccagtgattttctgtttagttcctcagcttctctgtcagtgctttgtagttgctctgtcttctctccatgtggaagcagctgctgagaccaccgacaccttcttttccagaactcgtggggttttcctgtctgggtcagcaggagtgggcagccggtcacagaggcgtagaagtattttcctatctgtaaacacatttaatggaagttttagtgatggccacccagggattccctgttttgccttagatgaggtcagaggaaggaaggtgacaatggctgttcttccttctgtctccaaaggtgcagggggacccccgtgtcatggctcccaatatggtctgtagaaaatggaagagggagctggagttgctgcagcttgggcgattaaaggattctctcctgatgctcaggagaagggtgagggaagtgttggttaaggacagatggtaaatgctttgagctttgcaggctaccgtctttgtcccttcagccactttagtgtggcagcagccatgtgagtatatacatgataggcatgggtgcattttaataatgttttcttttcaaggaaagacaacagggtttctcagcacgattttgccagcacctgctgtgaggcacggcagcatagcttatcttggttatttttccctgcccggccaggtaaatgagtcctggagatgtgctctgtgtgtgtgtgtgtgtgtgtgtgtgtgtgtgtgtgtgtgtgtgtgtctcatggccaagctagggcccaccccagatcatcgccaggtttggaacatcctggtctgtttcctagctcatgacctgctcagcacaaggccacaacagtgccacctcgagcctcccatcagttgagtgtctgtgactggagggaactgcacgcccatgtgtagtctcttgcctcaaagcctttgcagccgtcgaggcctgcaggaaatgggggctgtgcgtaacagttggactctgctgctccaaacggagctttccattttggaagcagtgctcaagttttgtctgtgggttctgccctctaattatgttcccttttcactgaggggtgtggttagcaccatgaacatatacgtgggcttcccagtgcaagcctcatgctggctttctgagagggtttgattggaccctttccaggactgaagttccttttgacacaagggtgctcttgtgtgagagaaggcagagcatgggaggtaggcctgtttgggctctgaaggaccctccctcaggctaatacaacccagctcactgtgggaagggaggatgtgggttgataggatgagtgtttggggcttcgattgagatgggtcagcaggtaagaaacacgtgctgccaagacttgatggcctgagcacagtccctggaagccaaagttgtcctctgatctccatacatgtgtggaaaccaaccaaacacacacacacgcacacatacacacacacacacacacacaccccacacacaccacatacaccacacatcacacaccatacacacacacacaccacaccatacacacacacacatacaacacaccatacacatacacacataccacacacacacacatacaccacacaccacacacacatacaacacaccatacacacacacacaccacacacacacacatacaccacacacacacacacaaacacacacacaccacacaccacaccacaccacacacacacacacacacacacacaaacacacacacaccctattttataagggaaggactgaggctactaaatccagttcaacaacttactgggtgaatgatcctgggcatataatttaacaattctgaattccagttcagtcatctataaaagaaagaggccgacagtttcccagctttgttatcaggtttgctttaacctttgacctgggctggggaggggcagggagtgatagacaagagtctacagagatctacaaacaaattgaaaacctgaaggggaaagacatcggaactgtgctataatttggaccagagttttacctctttcttgtttctggctacaaggcaaatagttgcctcaacaaaggccaaacacagtgggaccaaccagttggtcatgtttgttatcgtaaaggaaatcaactaatacaaccagaatgtggacatacaagatagttactttccctcacacagatagaaggtggacttgcaagatggttgcttttcttctccttgggtatttctgggttgaagggtgtgacaggtgtgactcagggctaggtttctgagttttctataaacaggggccactgggtattgctttggaccttcctggcttgttactcggtaaggttcattggaatgagaacctgggaatgccaggttccaattggtggagccagttacaattggtgttgccaggactcctggatctgaccacatacttatacccattgctagaagaacgatgcgaagcctcttttactgcctgtgatcaggagtctcagctttctgccaaggtcacagttccctgggcacagctgtctggggctgaggaccttgcctctccttaagtagaccagtgagctaaagacacttcttccagcccactcagaccaccccatactgaggcctcctgcccttgttcccattttatagatgattgtctgagagctaaagtttttttaaaatttatttatttttttacttattcactttatatcccacttactgtccccctcctggtcactccctcccacaatccttccctaaccctcctcccacaatgcttccctatccctcctccccttctctgaatgggtggtggctcccctgggccccactctggcactttaagtctctgtaaggctaggcacttcctctcccactgaggccagacaaggcagcccatctagaggaacatatcccatgtataggcaacagcttttgggatatcctctactccagttgtttgggacccacatgaaggccaagctgcattcttctatgtgtagacatccacttagtccagctccatttgttgatgatgctttcatttttccattgtatggttttgacttcttttattaaaaatcaaatgtccataggtatgtgggtttatatttgggtcttcaatttgattccattgatcaatgtgtttgtccctgtaccaataccatgcagtttttatcactattgctctatggtacagcttgaggtcaggtgattcccccagaagttcttttcttgtttaggattcttttgaatatccgttttttttttccacatgaagttgagaattgctctttcaaggtcgataaaatattgtgttagaatttcaatggggattgcattgaatctgtagactgctttcggtaagatggccattttcactgtgttaagcctacttatccatgagcatgggagatctttccatcttctgagatcttcagggacttgaagttcttgccatacagatctttcacttgcttggttagagtcacaccaagatattttatattatttgtgggtattataaagggtgttgtttccctgctttatttcttggcccatttatcatttatataaaggaaggctactgatttctttgagttaattttttatccagacactttgcttaaggtgttgatcagctgtaggatttctctggtagaatttttgggatcccttatgtaatactattatgtcatctgcaaatagtgacactttgacttcttcttttccagtttgtatccccttggcctcctttagttgtctgattgctctaactagaacttcaagtactttattgactagataaggagaaagtggacagtctcatcttgtccctgattttagtggaaatgctttaagtctctctctgagagttaaaatttttaaggtcaaatggccatgactgtaattccaatctgttatctttgctgtaggatcttgaagaagattgtctataaagaaacaggttacaagaatccagcagtgtacatggcccacttccaatgcacacggcacacagcaagtgctcataaaaaccttagtttttattaggaagctctttttaaattgttctacaattaaggcttactgtttttattccactgtcatgaaccaaactactacgattatcttcatccaagtggtttgttttctcccttgtatcatttccttgggttgctgtccaagaaaagcactggcaggtggaaaggtacagccctccttttcactttggttccgtgttgtcaaaagctctgatgtgggatggtttcctcagaaagctgccgctgccagataccagtgagactcagtgctaaggtctgtgtggatgccaggtgtgagcagatgatggggagagaactgaagagaggacagctggttaggtcctggggttttctgcctcaactctttctggcaagactactcaagacccctccctcaggagcttttcctggccacactctccacgatgccagcctcactgattttcatgtcctcactgacttgttttcttgttttcagctcctacccagcatggcagcatggatttattttattgtctcctttccctcctacacaggtgaacccattgagaccaatatttttttaaaaatacttaaaaattaatgttgctatatttacttattttgtgcatgtagggatgcaggatgcaggtgtaggcacatgcttgctgcattgtgcacgtagaggtcagaggacaacttgtggttggttcttcttctaccatatgggtcctggggcttgaactcaggtcttcaggcttggcagcaaacgtcgttacctgctgagccattgtgctggcccgatgaatgatttttaaaatgtaacatttttatttattttttgagaagctcatatgtaaattatatgtaatatataatatatatatacatatatatacatccccctccacaaatatataaataatttgtctatttaccctttactccctcagtttaacttctcccagatagcctctttcctcttccaactttgagttgctcctgctgctgctgctgttgtttttaaataacccactgagtccaacttgtggtacccatacacgaataggtgtagagccatcccctggagcatggctaatctggaggggccatatccctgagggaaactggctctccctctctcagcacattagcctctatcccacccatgctgggtgttgtcacccatggccttgtcaccacagcggttgttaagttcaccagtgcagcagtcctgccatgtccagaggacactgtttgccccggcatttcccacccgccagctcttacagttttcttctcttctggggtgttccctgagccttggggaagggactgtgatatagatgtcccatttatgaccgagcactccaccaacgtactggctctctgcactttgaccactgagggaaaggcctgtgtacaatcttaaaattgtgtcttttgcacagcagcatcagcacacgacctgtgtgagttgagtgttgaataaatgacggtgttgcaaacttggtaagaggggtaaaaatttaaaagggccaaagccatttttgtctttaaggggaattagtctttttggtgcttaggcccctattggaggctactagggctgatatgattatctctggcctattagagattgttttacttctccattagtggtaacaagctatctcccacatagtggcctatgctctaatttgaaaagaagagggacaaggtggctagtgactcagatggctacaggctagaatcatgtgagatcttccttaccaccctctggggtctagccttgaaggctaagcagggaagctatcagggcatcacctgcctgtggcctgggattcctcactcctggtggccgagtttctggagggggtgaccccacagggacacacttgagctttgtgccgctttgttgcttagccttagaggtctcacactgtcacttccccagtagcggtcaacacagttctaaacctgctcacattcaaaggacaggggccaagccctcctttcaccttcatgacatcttccgagcaggacagttcttctccacctccatcgtaggcagttgggctcctttaggacagggtctggcatgtttgtttaacacgaaggaccttccagttgtcaggcacacaataaacactcagcaagtgaggagcaagggagcacatggtttccatggatgccttataacactgtgtctctaggatggccttgcacgcctgtcaccaagaggtatgtggttagtgccaggtataaatgaacacacaggatgactggggaaagcatgtggtggttaaatgtcttcttcatggccttcgcaactgcatatcacccgttttcacctcttcctgccatccattctcacaagcgaccttggagtgtctaccatgacggcagtgccgtaagtgaactccgttgcccccatgatgatcctatgagatgaggctgttgtagtgtggggcgtgtgtcttccaaaagacaggtattaaggctgtgctctccagtgtggctggcgtcctgctacttgctgtaataaaatgccctaacaaaaacatcttaagggaggaaaaggttattttgactcagaggttgagtaggcagtccatcacagtggggaaggcacggatggcggtgtgagtgtgaggctgcaggccacagagtcaggaggcagagtaatggatgcctgcactcagctaacttccgcctctctatgaagccctaaggatggcgtagctctcgtttggatggaccgttccatctcaattaacccagtcaagacaatggctcacagttgtaccccaaaccagccttttccagataatccttcatggatgtgcccgaaggcttgtctctttggaggttccagaccttgtctagttgacaaccaacactaatcggcacggtcagaaggacagtggaacctttaagaggtagggcctagcgggaggtcctttggtcactggacatgtatctttgaagggagcagtgggactccagcccccctttttccccttctcttcatgaccatgaattgagtgtattgtatccaccatgaactcctgctgtgatatgcttccacagactcaaaacaatgtggccacctgattaagggctgccatctttaaaactgtgagcccaaataatcatttttcctttctgtgttgatttccccaggtgttggttatagaacagaaaactgattgggatgtttactatcaatcattaacatggtaagatctagagtcgccttggagacatgcctctgggcctgcctgtggagggttattttgattcggctaatgtttgaatatctgactcgtatgggtggcatcatcctgagggctgggactgtatacaacaggagacagtaaactgagcacaggcatccccaccccctgcttccggactgtacaatgtaaccagctgcctggaactctgtgggtgccatttgcccaccctgatggattgtgacttcaggatttgagccaagacaacacaccctttctcccttaagttgcttttgtcagcttctcccccaactggccaagtatggcaacagaaaagataaccaaaacaccaacacaccgatggttcctgttagtaccccaggtttcaggtgggggattagagggactcggacacaaggaggctgcctcaggcacttcctggtgcacagttgggagaaaggtacacagtcttactccctggagcaggttgacttgtgccttttggtactcgtctttcaaatgtaaaccaggaagggggtcattgcctttcatgactttgatgtataattagtgtcctagaaagttttcggaaagtgcagccgcctctgtgtcttgctctggttctagttcagccgagagtattcattttagaagaggaagaatcaacacttaaccgttgtgttcattgactaatttggaccatttcaggccacaaccttggggaatagaagctcactatgagtctcctaacagctcatggcgaggtgaccacattttggcctcagacacaagaaatatcttcagacaaggctatttttttttcagtgccaaaatttaaccagctggaattgttttccatcccagtcagtcactctaagtcaagtagtttgccttttattgggaaacctgcattttaatgtatagatagaacgttatgtccttggctctaggagagaagaaactgggtctttatagttgggtgtcataagggatcaaataccagcacgtctgaagcatatgtccaatgtagttgcaactgtccctcccagtgaggcccagagcttgtgaaaggagtgagagaaagattcacaggtcaggggaggagagcaacaccgctgcttgacagcatagctcttgccatgccctgatctggagccttgggccagcctttcaggacagggcctctgctctacaaaagagagtgcattagccacagccagctcgctgacctctttccagtcgtcctcttcagagagtgagttcttaactcctgtgatgctgcctgctcaactcgtcactgtattttcatgccaccattatgtctgaggacaagtaaagtgccacgcgttggcaagggacttttgcattctttataacagtatctaaactggttggagagcctgtcacttcaaaatgtgtatgtgcatataaacttattgtttctgtgacccaagggaaattattggcaatattttgatgcctactccttgcccaaaccagacaatgagagtcatttcaatgctaggtattgtcaatcatcaggggtacaaaccttgggcgatgctggttgtagcttgtatttttagctctgtgaccctatctgtcgttgtcacctttcctcactttttttctattaaactatttgtctttttctttttgagttctagaagctctccacgtgatgctatttggacagaccttcaagaaatcttgtgacacggttttatcttttgaacatggaattgattttttgaaatgggtgacacgtgatggggctgagtcagactgaagggactaaagcagtgttcctttagtaaccatatgtctggaattatgtaagcttgtcatagacttgatgtctgagatgaccaagactccacagtgtcagaggagtgactgggatgagtaattaactgactagatgagaaagctcttgaaaacgccatgaatgtgtaccttaaatattttaacttgcaacagataatacaactttgcaaactttcactccgagggaacacttttgtctgtgggtttgttgacaggagtcaacattataattcttgctctggctgtgcttttaaggcattttctataccctctaaagccatcagtgtgtagaacacttatagttcatacaatttttccctcatttttaaaagttgtttcaatcaaacataacaataatttaaaagacttcatcattaagtgttcacagaaacaactattttgtcatgactttatatactattaaaattatatgcaaatttagccatgcacttgcaatattaaatataaccagcgtagacaattttgagcctgttgactcttggtaagcgcatagctcacttgcaggcatgagatgcgggatagattagagaactggagattagcccattaagcctcagcattcagcacaatgtggtatcagtcagtatctcgcctgtggggaatttagtcatccttatgctggcttccagggtaatcctggtgagtgtaaggaattaaagggattttactgtagcttctgtggagcaaaggaaacagaggagcaaaggaatagactgcaggatgaaagagagttgtagccattgcttcagcaagggattaatatccagaacagataagaaacccaaaagactcagcattcggccaggcttggtagctcatgcctgcaatatcaatacttggaagtcgtatggaagaaggctgtgggtttgagacaagcttagactatctagtaagaccttagcgaagcaaaaacacaaaaagctcatcagcataaaaaccacttcagaaaacagtgaatgatgtgcatgagtacttctcaaaagaagacatgcaaagaactattaagtatattaagaaattcccagatcattagtcactaggaaggtacaactgaaaaccatgagctatcctctcaccccggttaccatggttactgccccaaagactaaagagagaatgtacagtgaggatatagagggggaggaactcttacacactgctggtgactggttaagtcatacaacttgtcgaaacagtactcgtccgtccatctatccgtccgcccatccatccatccatccatccatccatccatccatccatccatccatccatctatctatccatccatctatctatctctccccctcccccaaggagtcttagaggtgtctgaacttccatgcttccggtagcactgtttctagcagccaagctatgcagtcacactatggactattatttatctataaaaataatgaaatcgtgtcatcttcagcaatgtggctagacctggaggacaaatgataaatgaaataagtcagtcgtagaaagagatacattgtatcttctcactcatttctttttattaatttataaggcaattataatataaaaaattcatgatatgtttaaaaatacctggaagagttttgagatccctaacacatagaattgataagtatttgagatgggcataattactttgatttgattattgtatattatatgaatatattaagttaccatgctgtaaccccatgtatatctctaaatattatatatcaattaaaatagagttgtaaggggacctttaaatctgagaggttctggaactttgggagctggggactactttcaaggttatacctaccccttccttcctgtggtgcctcctctgcttcctggtttgctgtgatgggaacagcctgcaccacacatttctactccaagaactgaactcttcctctgtgtcttgcccaccttgatggactgaaactgcgagctgagataggttctctaaattctttctgtgaagtgtttggtcatagtgatgcaaaagttaccaatacaggaactcataaatggtgtcaaaccactctcagatatttaaacttacccaaggatatggctatcaaagaaaacaaattattctgaataagggtgggcttctgtctagctaagattattgggtgactgctgtgccaagtatggtaaaagcttagcctgagttactctaaatgttcataagggttaaacatccttaccacacccagggaaacataggtgttgttatctccactgtatagatgagaaaacacacagccagcaaataacagaaccaggatttgaaaccagacaggttgatgcagtgaccgaagccacagtataaatagtctgtctctgaaaaagcctgaggagaggccaacctgaactttcatattcagaaagggaacagaagttagttaaggcaggaacttcggcttcagtcagatttcattcattaacctagttttgtatggcctagaactgatttcacattctagagatcactgccaccctacaggagtcatagatacaagaaagccataagggtagagggcgctctaggaggacttcacaagtcatacagatgtggatacaggatatcaaagtacgtcagtggtacagagaggaggtacgtgtaccacagcagatgtgtgagccccttagatggggctggaggataaaggctatgtcacaccattttggagactttgaacataagcatggagagcataggaaaccatgacttcccatagggaagcaacaggaacagatttgccctaagatcccttattaaaatgatgaatggcttagagacagagtaccagtggactatgatgatggtaggtgtgctaattagattattggagtaattgaagtgaaactgagccctgatcaaaaccctaccagaagtaagtgttaaagacatgaggacaagattcttcacaatggcactttgtttgaacaccaggaacactgggttcaggctagggagacagtgggttacatctgattctgctgctaatgagctgatagcttcatctccgagtcttatcaaaatggaggcgctttcccctctccagtttgtgtcgttggaccagtggagcccatgtgaggacaaacattcaaggaagatacttgaagccagctggactgggcaagggttcagtatgggtgagaagaatatgtggcccgaagggaggcgtaaggcaggacagggcagccagaggattatgtgagagacaaaggcagttggggaaagaagagcatgttcacatctcaggagaattagctccaacctttgcttccttagagcactgaggcttctctactctagagacttcggttgtactccatgttttcctgcttattacgccgataccacaggatccgggcactgtagcaagtgataacaatacgcttgagaagccgacaactgctgtagcagcagcagcaactcccaagccataggccctgagaaggcccagaactcaatagcaagagtccccagtccctcagtttaccttacgccgctagttgaacgtcacagggccttagtcccagacacagaggtgagaggtacactggaaggggaaagggatggatatgaaagggcaggctcagcataggctactaggttggccttgcctctgggaagaaatgtggtgaaaatgtggtcacggccataacatacagtttttaaataccccaaacaggtcttcttgcaacatacctaaacaagcaaacatacctaaactctggagtttggagtcataggtggactcaagctctactctacagagaccatggaaattactgaggttttctgagcctgttttctttattgaaaagtgagaacaagcttgcctgcactgcatgacttaactgtgggggagtgggagagacaggctagaacaatgtgtaatgacacacttatatgccaacaaagaagcatttgaataggtggcatagtaattatttctccagtccctgtgacaaagtatctgatagaactctctcttaggagggcaggactccttcccgttcatggttggaggttgtttgctactgtgtatgcagaccagctaatctgggagcttctagagagtttcttgtttctgcttctcatctagccacagaagcactgggtgtgtgctactgggccagttttccaatggctgatgttttaattatcaactcgacacagtctagaatcattcaggaagggagtttcagtgggggattggctagatcaggttggccttcgggcatgtctgtgggggggattatcctggtgatattaactgaggtgggaaggtatgtccactgcgggtggcaccattccttggagtagggagtcaggaatggatgatagcagagaaagtgctctgagcactagtcaatatcccttcctctttgtgccaggttatgaatataatataaccaactccttcaagctcctaccaatgtgaattttcttctgtgatgggctgtaacctggaactgtgagctaaaaaataaacactttccctcccaagttgtttggaatattttatcacgacaacaagaagtgacactagacaagtaggttctagggatacaagctgaagtttgcatgtgtcctctctctatctggtaaacctctctttttgaaacgtgtgtgtgtgtgtgtgtgtgtgtgtgtgtgcatgcgtgtgtgtttgtgtgtaaaatgtttgtgctcctcaagcactttacctacagggctacgtccctggccctcctttaagtagtctctagacttgacactgaattattaaaggaataataacagaaacaaaaactccgtgtgttcagagaaactcagtttggggagtaatttttggtcaaatccatttggatttgaagatgtggagagaaaagaagcagctataagtaagtatgtggaccttaaataaattctaaaacactcctttctctgtcccgcatagcaggtgtgggagaggctcctgtgactgacagggtccttcaggcttgacccagatgtgttcggtgtgtgaaagtaactgtctagatgaggctgtgggctgcatgcagagtgtaacctaggaagttcgtgggagtgaagaggggaagtgcctcctaagagaggtcttccaggagaatatgagattagttgaggttcatcgaatccttttgtggcttaattgagaggcatatttggagggataaacctctcgtgtagagctgagcatcccagccttgttgccatagtaacggtactcaagcaggctcacaccccagaaaacacaaggtctgagggattctgctgaagccatggttgttccgtagaggtccccactattgtgttcgactaggcagaggggcacgggctttgaatagctcccttccttcctctttctagccatggggtcattgctttgttttctttcctccctggactgaagtggcctctcaaaatgggtacctccctgcggatggagctaatcggtatttaaagaagcacctttctcaggccctttctttcttggctttctggaacttagcagaatccccaacaccaagcatctttcctctgctgtagtcagaacatgaacctggttgcagtgaactacatcatcccttgcagtaagcactcactttgctgtttcccagcccatacctttttggacatggctatccttcctacctcacgggggaaagggtaaaagagtccctacattgaagctgacttgtgggcctggtcacttgtcacggtcactcagttcacctggattccttgagccccactcaggtctgcaaagatgtgttaggagacagtcgcttcttccagtctgacagttgcttctagcaccgttgtcgtccgtgtggcctttacctgctgacagtctggcttctagactttaacctgtttttacccaagaactcctgagactgaattgtcaaaagtggagtgctgaggaacgtttttattttgtcagtacccttggatcctgatcccttcatgataattcatgttccacaggacttcccagcagactccaagggcccccagccctctttgctcagtaccagagtgtgtaacaccggccatagcagggacagctgcattctgggaaccagctccatctgtattagacgtggttccgccttaacacacttgcagcccagtgacacagttgctctagaatgtaaactcttccaaggagggccctttgtcctctgttttgttagataaggaatcctctgtgcctaccacagtgactaatgtttattagcatttattagattctgctaataaacgtgcaataaaatatattgagtaaatgaatgattgtatatgatgtgcacatataaggtcaaatggggagaagtacattggataggggagtttcttaaaggtgaaatattggtagcagaaaccaacagggcaagttgaaatcagttgattgttggaatttgttgagcttcccattattgcctcttgcagacttgtctttgaagacattttctctctttgaaaatgatgtatgttttaatcatcatctatagtattgtatacatggctgttagatctagcttttatgtttcataataagaagtttgtgttttcacctaaataattgtaagactgagttaaactgagcagacttagctggattctgagctattatttttgttgttgttttgttattggggctaagctactgagatactgttcctaaagtcaatgccaatgctctgatttacattttctttatctatctatctatctatctatctatctatctatctatctatctatctatttaattttacattcccgttccagcttcctcctccttctcctcccagactccctttcacaaatccctcctcccattaaccccctctcgttctcctcagagaaggggaagccctcttgggtaccaccttgttctgggacatcaagtcacagcagaactctaagtgcatcctttcccactgaggcccaaccagtcagtccagctactgcaagaggaatccaatggcagtcaaaagtcagagatagctcctgctccagttgtttggggaccacacaaagaccaagctgttcatctaatacaaatgtgtatgggcctaggtccagcccttgcatgctcttttgttggtgattcagtgtctctcagtcccccatgggcccaggctgattgactgtcgtcttctttttttttttttcggggctggggatcgaacccaggaccttgcgcttcctaggcaagcgctctaccactgagccaaatccccaaccctgactattggtcttcttatggtgtacttgacccctctggcttgctcaatcttatccccaactcttccacacaactcttgagctctgtttgatgtttggctgtgagtctcttcatctgtttccatcagctactggatgaagcctctcaggagacagttatgctaggctcctgtttgtaagcacagcagagcatcattaatagtatcagagattggttccttcccatggaatgggtatcacttatctttttatcgaagtctggttattatcatgtagagagtctcttgactaactatgcattaaagtctattttgtttaatattaatttagcttttgatggttagtttttgccctatatagtttcccagtcatttcttttaaatgtctttgtgtgttttagctttgtattctgaagaatatatagctaggtattatatatttataatttgtcttttaactggttatagggttatagtatatccttgtcccagaaaaaaaaccaatgtttttcagtttttccatcactgtctaatcaatatttagatgatctacaagttttaactcttaacttgatacaatctagaatcactagaaaagtctcggtcagctattatctagatcaggttggtctgtaggcatgcctttgaaagattgtattgacccagcccattgtgggcagcatcataccctaggctggcccctaaactgtagaagagtggagatatccttctgggcagcaagcagacaacatggatgcattcttttctcttgttcttggccatggaagtaatgtgattagttgcttgagttcctgccttgacttttccaaaatgtcgggccctataacttgtgacaaaagctcatcagccatggtctctcctctcttcgtcatgtctttatctgattttcatatcaagtaatgttggtcttgtgacatttctttagttcagattatatgtttaatctgcatgactcttgacagtttgtatttttaaagaaatttgtctgttttatctgttgacaaattgtggacatatagtcatttataatatacaaggtaccttacccagcaaatggctaaatggtcaaggtccatggtgagtcaaaaaatagtaaatgagagattctaattagtcacatctttaaacagcatcttcctctaagtagtatggtgaaattttatagcatcctactctgttcttttgtccagaatacccattttcaagccaatctgcctactagttacttagtgattatttaaattatcatgtacattccgtgtatatacagttgtatcgggtgcttgtgttcaagtaatctataatttatttaaggatgattctaaactgcaacttattattattaaactacattgttgtatctgttatagtgtactatttgtaattgttattctcttttttgcctaatttgtaaattaaactttgtcatacaattgcatatatatagaaaatagtgtacacaaagtctgtttttagacatccacttgagggtgaataagggaagactactctgatttttcagtatctgtaggacctgtaatagcgtctcttctttcattcttatgatttatagtttgtgttatctctgcttttttttcccaatcaatatggctacatactcaccaacttcattgatcttctccaaagtcaaactttcgtttcattcattttatttctattttttcaattttattgatttttgactttattatttcctttcttctgatgaatttgaatctaatttggctttattctagttttctaaagcgaaagctcagtccactgatttgaggctttttcttcattgatatagatatttaatactaaatttaatttaaagatttctttttaggctcttgcaaccctcccattcaatacaatgtgttttcctattcattcactttgaggttgtttgttttttgttctgttttgtttgtttttgagataggtcttatcatgtagttcagactggcctcgtattcataattctcctggttcagcttccggagtgctaggttagacatatacaccaccatgcataaccaacctgaagtactttctaagattcccgtgacttcttttgaaccacggttctttggacatgtaatattgtatctctaaacatgttaagaaccttttagatatgctcctgctcgttcaatttcattttcctcagagaccattcctaagttatacctcttcttttagtttgattcatgtttgttcagtggcccagaatctgggttaattgattttgggaagaatgtgattttggtgtctgtgggtggagaatctagccattcgggttggaatagtgagccgctcatcaggtcctcccttgttttctgcatagtggagtcttcaattatagcagtgggtttttctagctctacttgtagttttaagagtttttggaagtattttagaagtccatgttaagcgtttgcatgttattctctctccagtgaactgactgactgtgaagtgactgtattcctagcagtgttccttcttctaactcctttgtctggagtcagcgtagccatttctgctttatttaatcaatgcttgcatttttaggctttattgtgggtagtatataattgagtatttgtttgttgttctattttaattctttatttttatttatgaaattatctttatttaataaaattattaatatgttggagtaaaacatggccgctatttttttttatctatttattctctctttgcttttgtccttgttctacctgctgcaacgttgagttttgttgtttcactttgtcgccagcattttctacttctcatacttatttagaatgcactgtttgcttcagagcatctggtactatgccgtagcccctaaacggttgttcttttcctggttctttcgtttctttgctcttcagtggagagtggagggcatttcaggtaggcttatccacaaggtcattgattttgattcttgggtcgtgtaacatgtgctggttagtgtgctgagttggaaagtggactgctgattgcctggactggggtttggggagcaacagtgagtatagactttctttcttagggatgagcatgctctggaatttgtcaaggagattctttttttttttttaattagatctatttctttacttacatttcaaacgttgttccccttctcggtttcctgtccataagcccccattccctcccctccccctcccccatgggtattcccccgatacatcccccttactgcctccacatattcccctgcactgggggtccaaccttggcaggaccaagggcttccccttcccctggtgccccaacaaggctattctctgctacctatgcagttggagccctgagccagcccatgtacagtctttggttagtggcttagtccctggaagctctggttggttggcactgttgttcttatggggttgtgagcttatccaggggattcttgcacaactctgtggctaaagcaggaaaaccctctgattttaggataaattatacggcatgtaaatccttttcaataaaatggcttatatatttatttgtttatttactttaaactttaatgttttacttttgcaaaaagtaaatacattggttaaaaaaataaaaattaaaagctcagcagacatcagaggggaaagccatcttcctgatgatgctgaaggaagcataagcagaaataatttttgaaggaaatgttactagagtggaacttggtgcaagattggatcgtgtgtattttattttgtgttgtatatttgattttatatttggaaaacaggccctatcagttactgtttcatttattggttcactttacatcccaatatcagctccccctctcctcccagtatctctgcatacagatcctcctccattcttccctcat

SEQ ID NO: 416 - DNA, 9905 bp, synthetic construct
  misc_feature 1..9905: note = Synthetic
  source 1..9905: mol_type = other DNA
gggctccccgcgccgcccggtcggcagcagggcgctgagcgagctcggagcccgcgctgtgcgcctgcggccggggcgccccgccgagcgccggtgccccggctcccgggccgccttcgccgcgcgggaaggattcttcaaaattaacagaaaccaattcgggccagctgaagagaaaaaataaaggtggctcccggctgcctctgctgcagttcagagcaacttcaggagcttcccagccgagagcttcaggacgcctttcctgtcccactggcccagttgccacaacaaacaacagagaagacggtgaccatgggggatgtgaagctggttgcctcgtcacacatttccaaaacctccctcagtgtggatccctcaagagttgactccatgcccctgacagaggcccctgctttcattttgccccctcggaacctctgcatcaaagaaggagccaccgccaagttcgaagggcgggaagttttgcgaagcagcttggtcagcctgttgtttccaaaaccttaggggatagattttcagctccagcagtggagacccgtcctagcatctggggggagtgcccaccaaagtttgctaccaagctgggccgagttgtggtcaaagaaggacagatgggacgattctcctgcaagatcactggccggccccaaccgcaggtcacctggctcaagggaaatgttccactgcagccgagtgcccgtgtgtctgtgtctgagaagaacggcatgcaggttctggaaatccatggagtcaaccaagatgacgtgggagtgtacacgtgcctggtggtgaacgggtcggggaaggcctcgatgtcagctgaactttccatccaaggtttggacagtgccaataggtcatttgtgagagaaacaaaagccaccaattcagatgtcaggaaagaggtgaccaatgtaatctcaaaggagtcgaagctggacagtctggaggctgcagccaaaagcaagaactgctccagcccccagagaggtggctccccaccctgggctgcaaacagccagcctcagcccccaagggagtccaagctggagtcatgcaaggactcgcccagaacggccccgcagaccccggtccttcagaagacttccagctccatcaccctgcaggccgcaagagttcagccggaaccaagagcaccaggcctgggggtcctatcaccttctggagaagagaggaagaggccagctcctccccgtccagccaccttccccaccaggcagcctggcctggggagccaagatgttgtgagcaaggctgctaacaggagaatccccatggagggccagagggattcagcattccccaaatttgagagcaagccccaaagccaggaggtcaaggaaaatcaaactgtcaagttcagatgtgaagtttccgggattccaaagcctgaagtggcctggttcctggaaggcacccccgtgaggagacaggaaggcagcattgaggtttatgaagatgctggctcccattacctctgcctgctgaaagcccggaccagggacagtgggacatacagctgcactgcttccaacgcccaaggccagctgtcctgtagctggaccctccaagtggaaaggcttgccgtgatggaggtggccccctccttctccagtgtcctgaaggactgcgctgttattgagggccaggattttgtgctgcagtgctccgtacgggggaccccagtgccccggatcacttggctgctgaatgggcagcccatccagtacgctcgctccacctgcgaggccggcgtggctgagctccacatccaggatgccctgccggaggaccatggcacctacacctgcctagctgagaatgccttggggcaggtgtcctgcagcgcctgggtcaccgtccatgaaaagaagagtagcaggaagagtgagtaccttctgcctgtggctcccagcaagcccactgcacccatcttcctgcagggcctctctgatctcaaagtcatggatggaagccaggtcactatgactgtccaagtgtcagggaatccaccccctgaagtcatctggctgcacaatgggaatgagatccaagagtcagaggacttccactttgaacagagaggaactcagcacagcctttgtatccaggaagtgttcccggaggacacgggcacgtacacctgcgaggcctggaacagcgctggagaggtccgcacccaggccgtgctcacggtacaagagcctcacgatggcacccagccctggttcatcagtaagcctcgctcagtgacagcctccctgggccagagtgtcctcatctcctgcgccatagctggtgacccctttcctaccgtgcactggctcagagatggcaaagccctctgcaaagacactggccacttcgaggtgcttcagaatgaggacgtgttcaccctggttctaaagaaggtgcagccctggcatgccggccagtatgagatcctgctcaagaaccgggttggcgaatgcagttgccaggtgtcactgatgctacagaacagctctgccagagcccttccacgggggagggagcctgccagctgcgaggacctctgtggtggaggagttggtgctgatggtggtggtagtgaccgctatgggtccctgaggcctggctggccagcaagagggcagggttggctagaggaggaagacggcgaggacgtgcgaggggtgctgaagaggcgcgtggagacgaggcagcacactgaggaggcgatccgccagcaggaggtggagcagctggacttccgagacctcctggggaagaaggtgagtacaaagaccctatcggaagacgacctgaaggagatcccagccgagcagatggatttccgtgccaacctgcagcggcaagtgaagccaaagactgtgtctgaggaagagaggaaggtgcacagcccccagcaggtcgattttcgctctgtcctggccaagaaggggacttccaagacccccgtgcctgagaaggtgccaccgccaaaacctgccaccccggattttcgctcagtgctgggtggcaagaagaaattaccagcagagaatggcagcagcagtgccgagaccctgaatgccaaggcagtggagagttccaagcccctgagcaatgcacagccttcagggcccttgaaacccgtgggcaacgccaagcctgctgagaccctgaagccaatgggcaacgccaagcctgccgagaccctgaagcccatgggcaatgccaagcctgatgagaacctgaaatccgctagcaaagaagaactcaagaaagacgttaagaatgatgtgaactgcaagagaggccatgcagggaccacagataatgaaaagagatcagagagccaggggacagccccagccttcaagcagaagctgcaagatgttcatgtggcagagggcaagaagctgctgctccagtgccaggtgtcttctgaccccccagccaccatcatctggacgctgaacggaaagaccctcaagaccaccaagttcatcatcctctcccaggaaggctcactctgctccgtctccatcgagaaggcactgcctgaggacagaggcttatacaagtgtgtagccaagaatgacgctggccaggcggagtgctcctgccaagtcaccgtggatgatgctccagccagtgagaacaccaaggccccagagatgaaatcccggaggcccaagagctctcttcctcccgtgctaggaactgagagtgatgcgactgtgaaaaagaaacctgcccccaagacacctccgaaggcagcaatgccccctcagatcatccagttccctgaggaccagaaggtacgcgcaggagagtcagtggagctgtttggcaaagtgacaggcactcagcccatcacctgtacctggatgaagttccgaaagcagatccaggaaagcgagcacatgaaggtggagaacagcgagaatggcagcaagctcaccatcctggccgcgcgccaggagcactgcggctgctacacactgctggtggagaacaagctgggcagcaggcaggcccaggtcaacctcactgtcgtggataagccagaccccccagctggcacaccttgtgcctctgacattcggagctcctcactgaccctgtcctggtatggctcctcatatgatgggggcagtgctgtacagtcctacagcatcgagatctgggactcagccaacaagacgtggaaggaactagccacatgccgcagcacctctttcaacgtccaggacctgctgcctgaccacgaatataagttccgtgtacgtgcaatcaacgtgtatggaaccagtgagccaagccaggagtctgaactcacaacggtaggagagaaacctgaagagccgaaggatgaagtggaggtgtcagatgatgatgagaaggagcccgaggttgattaccggacagtgacaatcaatactgaacaaaaagtatctgacttctacgacattgaggagagattaggatctgggaaatttggacaggtctttcgacttgtagaaaagaaaactcgaaaagtctgggcagggaagttcttcaaggcatattcagcaaaagagaaagagaatatccggcaggagattagcatcatgaactgcctccaccaccctaagctggtccagtgtgtggatgcctttgaagaaaaggccaacatcgtcatggtcctggagatcgtgtcaggaggggagctgtttgagcgcatcattgacgaggactttgagctgacggagcgtgagtgcatcaagtacatgcggcagatctcggagggagtggagtacatccacaagcagggcatcgtgcacctggacctcaagccggagaacatcatgtgtgtcaacaagacgggcaccaggatcaagctcatcgactttggtctggccaggaggctggagaatgcggggtctctgaaggtcctctttggcaccccagaatttgtggctcctgaagtgatcaactatgagcccatcggctacgccacagacatgtggagcatcggggtcatctgctacatcctagtcagtggcctttcccccttcatgggagacaacgataacgaaaccttggccaacgttacctcagccacctgggacttcgacgacgaggcattcgatgagatctccgacgatgccaaggatttcatcagcaatctgctgaagaaagatatgaaaaaccgcctggactgcacgcagtgccttcagcatccatggctaatgaaagataccaagaacatggaggccaagaaactctccaaggaccggatgaagaagtacatggcaagaaggaaatggcagaaaacgggcaatgctgtgagagccattggaagactgtcctctatggcaatgatctcagggctcagtggcaggaaatcctcaacagggtcaccaaccagcccgctcaatgcagaaaaactagaatctgaagaagatgtgtcccaagctttccttgaggctgttgctgaggaaaagcctcatgtaaaaccctatttctctaagaccattcgcgatttagaagttgtggagggaagtgctgctagatttgactgcaagattgaaggatacccagaccccgaggttgtctggttcaaagatgaccagtcaatcagggagtcccgccacttccagatagactacgatgaggacgggaactgctctttaattattagtgatgtttgcggggatgacgatgccaagtacacctgcaaggctgtcaacagtcttggagaagccacctgcacagcagagctcattgtggaaacgatggaggaaggtgaaggggaaggggaagaggaagaagagtgaaacaaagccagagaaaagcagtttctaagtcatattaaaaggactatttctctaaaactcaaaaaaaaaaaaaaaactcaagatagtaaaagcacctagtgtgatagattatcggttaggtcatttgtgggttgattcttcagaaacagcagttgatacctagcagcgttattgatgggcattaatctatgttagttggcaccttaagatactagtgcagctagatttcatttagggaaatcaccagtaacttgactgaccaattgattttagagagaaagtaaccaaaccaaatatttatctgggcaaagtcataaattctccacttgaatgcgctcatgaaaaataaggccaaaacaagagttctgggccacagctcagcccagagggttcctggggatgggaggcctctctctccccaccccctgactctagagaactgggttttctcccagtactccagcaattcatttctgaaagcagttgagccactttattccaaagtacactgcagatgttcaaactctccatttctctttccccttccacctgccagttttgctgactctcaacttgtcatgagtgtaagcattaaggacattatgcttcttcgattctgaagacaggtccctgctcatggatgactctggcttccttaggaaaatatttttcttccaaaatcagtaggaaatctaaacttatcccctctttgcagatgtctagcagcttcagacatttggttaagaacccatgggaaaaaaaaaatccttgctaatgtggtttcctttgtaaaccaggattcttatttgtgctgttatagaatatcagctctgaacgtgtggtaaagatttttgtgtttgaatataggagaaatcagtttgctgaaaagttagtcttaattatctattggccacgatgaaacagatttcaactgataaagagctggagaactccatgtactttggaatctcctccaagatagccagagtttaatacatcttcattctcaacactctccaaagaacttgacctaccttatgggttccatatttttcttcttaaatgtgcatcaatcatgccttgcccccaacctttaaatatattcttagacctggtaaatgcactcagacttgcgtctttaggaatttttaactttctttcactacattggcacttaaattttttctttataaagctttttgaaggtcataaacaaagaccataattgatgatagacctaatacatttcctctgtgtgtgtgtgtaacattccaaatactttttttttcttttccactgtttgtaaggtgcaacaatttaatatttttaagggactttttaagagttccttaagaaccaatttaaaattacttcagtgcaatcctacacagtatcaacattagaattttgatattagtcttatgttatcttccattctatttttatctgctttttgctgctagtttcaaactgccagtatttttccttttgcttttaaaatagttacaatatttttcatgatagccacagtattgccacagtttattataataaagggtttttatttgatttagcgcattcaaagcttttttctatcacttttgtgttcagaatataacctttgtgtgcgtgtatgttgtgtgtgtgcatgtgtggcgtatatgtgtgttacaggttaatgccttcttggaattgtgttaatgttctcttggtttattatgccatcagaatggtaaatgagaacactacaactgtagtcagctcacaatttttaaataaaggataccacagtgcatgctgtttgttcaatctttgcagacttctctttctttccatgctaccagttgtaaaggacacagctatatcctggaaatgaaaaacaaacactgtggtgcctagatgtgaagaactggcttatgtggttgtgttttgctatggaacagaatgatttaggaagttcttgtttatataggtagccgaatttacacatttagttcaaaatttctcttgagcatcagcttagtactatatcaatcattctagaaggatatcttatagagcaggtgtccccaacccccggtaagtagcctgttaggaaccaggtcacacataaggaggttagcagtgggcaagtgagcaaagcatcatctatatttacagccgatccccattgctcgcattaccgcctgagctctgcctcctgtcagatcagcggcagcatcaggttctctcaggaacgaactctattgtgaactgctcatgtgagggatctaggtttcacgctccttatgagaatctaacacctgatgatctgtcactgtctcccatcacccctagatgggacagtctagttgcaggaaaacaagctcagggcttccactgattctacattatgatgagttgtatacttattttatattataataaaatatattattacaatgtaataataatagaaataaaatgcacaatacatgtaatgtgcttgaataatcccaaaaccaccccctctcctggtccatggaaaaactgtcttccatgaaagtggtccctggtgccaaaaaggttagggaccactgttacagagtatcaggtcctcaagatgctaaaatctatatgacatttttaacatgtgacattatcatcatcatcatcatcatcatcactgatgatactatttaccagggcatggtttgaattggtgactttggtgcagttcattattggcagccaaatgctttatccataccttcatattgaagaatttgttatcaggaaactaccagtcctgctttacaggaagtctgttatcagatatcagatggcaagttccccatgtcttcagatgttcaaacaatattgtggatggtctagaaagagtttaagacatgctgttaaatgtagggctagataattctctgattctttgatgtagtctggaaagaaacaatccattgtccagttaataaatatttagtgttttcatttttaagacactcacaatccacaaatgtccctaacaatttattatttttaaagaaaatgactttttattccttgctagtgaaaaatgtacaatttatatgctgcactgagaaaaataacagatatactttcttccattcattttcatcccaaacatataaaaaataatccattgattgttccttgcattgcatatcttattaaaagatatttcctacatgcaactaataagacatgctgactgttgtcagctctaaatttatgtaaagattttttatttttgttaaaatgtttgaaatttgctttttgctccacacctcacctgtttttgataaatctgtgctaataagtacataggaggtaataaataattgagttgtgagaaacccaattctccatttttcaagaaaacacaagtagcactactctctttatcccttgggactccttcctgtaatttgaaagggggggctaatgttggtggcagttgttgctaaggatctctgcacagagttagggcttcactctcggcttcctggttagatggggccatgtgactagtcctagtcagtgagctgtgaccagaagtgatgtatgtaccctcgggaccagagcatttatgtgctggtacaagcctctccataatgacgggcaacacatgagatggtggctgctgcagccatctgggtctctagccaacccaaaatggggacataacacaagcaagaaataaacatttgttcttataaatcaccaagattttggggttctcagtggctgcaacataacctagactatcctgatacaggcttatcaccatgttctggatgtgtggtgaccaggatggtagccactactcacaagtggctatttaaatttaagttactttaaaaaataaaataaaaaattcagttcctcagttgtatgagttacatttcaaatgctcgacagtcacatgtacatcacttttcaaattatgtgaaattaaaactgaaaagcttgtgtgaaagtctagagagtatggtctatagtttcatcaattgtattggataatatagtctcgatactcaa

SEQ ID NO: 417 - DNA, 10113 bp, synthetic construct; identical to SEQ ID NO: 411
  misc_feature 1..10113: note = Synthetic
  source 1..10113: mol_type = other DNA

SEQ ID NO: 418 - DNA, 9906 bp, synthetic construct
  misc_feature 1..9906: note = Synthetic
  source 1..9906: mol_type = other DNA
gggctccccgcgccgcccggtcggcagcagggcgctgagcgagctcggagcccgcgctgtgcgcctgcggccggggcgccccgccgagcgccggtgccccggctcccgggccgccttcgccgcgcgggaaggattcttcaaaattaacagaaaccaattcgggccagctgaagagaaaaaataaaggtggctcccggctgcctctgctgcagttcagagcaacttcaggagcttcccagccgagagcttcaggacgcctttcctgtcccactggcccagttgccacaacaaacaacagagaagacggtgaccatgggggatgtgaagctggttgcctcgtcacacatttccaaaacctccctcagtgtggatccctcaagagttgactccatgcccctgacagaggcccctgctttcattttgccccctcggaacctctgcatcaaagaaggagccaccgccaagttcgaagggcgggtccggggttacccagagccccaggtgacatggcacagaaacgggcaacccatcaccagcgggggccgcttcctgctggattgcggcatccgggggactttcagccttgtgattcatgctgtccatgaggaggacaggggaaagtatacctgtgaagccaccaatggcagtggtgctcgccaggtgacagtggagttgacagtagaaggaagttttgcgaagcagcttggtcagcctgttgtttccaaaaccttaggggatagattttcagctccagcagtggagacccgtcctagcatctggggggagtgcccaccaaagtttgctaccaagctgggccgagttgtggtcaaagaaggacagatgggacgattctcctgcaagatcactggccggccccaaccgcaggtcacctggctcaagggaaatgttccactgcagccgagtgcccgtgtgtctgtgtctgagaagaacggcatgcaggttctggaaatccatggagtcaaccaagatgacgtgggagtgtacacgtgcctggtggtgaacgggtcggggaaggcctcgatgtcagctgaactttccatccaaggtttggacagtgccaataggtcatttgtgagagaaacaaaagccaccaattcagatgtcaggaaagaggtgaccaatgtaatctcaaaggagtcgaagctggacagtctggaggctgcagccaaaagcaagaactgctccagcccccagagaggtggctccccaccctgggctgcaaacagccagcctcagcccccaagggagtccaagctggagtcatgcaaggactcgcccagaacggccccgcagaccccggtccttcagaagacttccagctccatcaccctgcaggccgcaagagttcagccggaaccaagagcaccaggcctgggggtcctatcaccttctggagaagagaggaagaggccagctcctccccgtccagccaccttccccaccaggcagcctggcctggggagccaagatgttgtgagcaaggctgctaacaggagaatccccatggagggccagagggattcagcattccccaaatttgagagcaagccccaaagccaggaggtcaaggaaaatcaaactgtcaagttcagatgtgaagggcttgccgtgatggaggtggccccctccttctccagtgtcctgaaggactgcgctgttattgagggccaggattttgtgctgcagtgctccgtacgggggaccccagtgccccggatcacttggctgctgaatgggcagcccatccagtacgctcgctccacctgcgaggccggcgtggctgagctccacatccaggatgccctgccggaggaccatggcacctacacctgcctagctgagaatgccttggggcaggtgtcctgcagcgcctgggtcaccgtccatgaaaagaagagtagcaggaagagtgagtaccttctgcctgtggctcccagcaagcccactgcacccatcttcctgcagggcctctctgatctcaaagtcatggatggaagccaggtcactatgactgtccaagtgtcagggaatccaccccctgaagtcatctggctgcacaatgggaatgagatccaagagtcagaggacttccactttgaacagagaggaactcagcacagcctttgtatccaggaagtgttcccggaggacacgggcacgtacacctgcgaggcctggaacagcgctggagaggtccgcacccaggccgtgctcacggtacaagagcctcacgatggcacccagccctggttcatcagtaagcctcgctcagtgacagcctccctgggccagagtgtcctcatctcctgcgccatagctggtgacccctttcctaccgtgcactggctcagagatggcaaagccctctgcaaagacactggccacttcgaggtgcttcagaatgaggacgtgttcaccctggttctaaagaaggtgcagccctggcatgccggccagtatgagatcctgctcaagaaccgggttggcgaatgcagttgccaggtgtcactgatgctacagaacagctctgccagagcccttccacgggggagggagcctgccagctgcgaggacctctgtggtggaggagttggtgctgatggtggtggtagtgaccgctatgggtccctgaggcctggctggccagcaagagggcagggttggctagaggaggaagacggcgaggacgtgcgaggggtgctgaagaggcgcgtggagacgaggcagcacactgaggaggcgatccgccagcaggaggtggagcagctggacttccgagacctcctggggaagaaggtgagtacaaagaccctatcggaagacgacctgaaggagatcccagccgagcagatggatttccgtgccaacctgcagcggcaagtgaagccaaagactgtgtctgaggaagagaggaaggtgcacagcccccagcaggtcgattttcgctctgtcctggccaagaaggggacttccaagacccccgtgcctgagaaggtgccaccgccaaaacctgccaccccggattttcgctcagtgctgggtggcaagaagaaattaccagcagagaatggcagcagcagtgccgagaccctgaatgccaaggcagtggagagttccaagcccctgagcaatgcacagccttcagggcccttgaaacccgtgggcaacgccaagcctgctgagaccctgaagccaatgggcaacgccaagcctgccgagaccctgaagcccatgggcaatgccaagcctgatgagaacctgaaatccgctagcaaagaagaactcaagaaagacgttaagaatgatgtgaactgcaagagaggccatgcagggaccacagataatgaaaagagatcagagagccaggggacagccccagccttcaagcagaagctgcaagatgttcatgtggcagagggcaagaagctgctgctccagtgccaggtgtcttctgaccccccagccaccatcatctggacgctgaacggaaagaccctcaagaccaccaagttcatcatcctctcccaggaaggctcactctgctccgtctccatcgagaaggcactgcctgaggacagaggcttatacaagtgtgtagccaagaatgacgctggccaggcggagtgctcctgccaagtcaccgtggatgatgctccagccagtgagaacaccaaggccccagagatgaaatcccggaggcccaagagctctcttcctcccgtgctaggaactgagagtgatgcgactgtgaaaaagaaacctgcccccaagacacctccgaaggcagcaatgccccctcagatcatccagttccctgaggaccagaaggtacgcgcaggagagtcagtggagctgtttggcaaagtgacaggcactcagcccatcacctgtacctggatgaagttccgaaagcagatccaggaaagcgagcacatgaaggtggagaacagcgagaatggcagcaagctcaccatcctggccgcgcgccaggagcactgcggctgctacacactgctggtggagaacaagctgggcagcaggcaggcccaggtcaacctcactgtcgtggataagccagaccccccagctggcacaccttgtgcctctgacattcggagctcctcactgaccctgtcctggtatggctcctcatatgatgggggcagtgctgtacagtcctacagcatcgagatctgggactcagccaacaagacgtggaaggaactagccacatgccgcagcacctctttcaacgtccaggacctgctgcctgaccacgaatataagttccgtgtacgtgcaatcaacgtgtatggaaccagtgagccaagccaggagtctgaactcacaacggtaggagagaaacctgaagagccgaaggatgaagtggaggtgtcagatgatgatgagaaggagcccgaggttgattaccggacagtgacaatcaatactgaacaaaaagtatctgacttctacgacattgaggagagattaggatctgggaaatttggacaggtctttcgacttgtagaaaagaaaactcgaaaagtctgggcagggaagttcttcaaggcatattcagcaaaagagaaagagaatatccggcaggagattagcatcatgaactgcctccaccaccctaagctggtccagtgtgtggatgcctttgaagaaaaggccaacatcgtcatggtcctggagatcgtgtcaggaggggagctgtttgagcgcatcattgacgaggactttgagctgacggagcgtgagtgcatcaagtacatgcggcagatctcggagggagtggagtacatccacaagcagggcatcgtgcacctggacctcaagccggagaacatcatgtgtgtcaacaagacgggcaccaggatcaagctcatcgactttggtctggccaggaggctggagaatgcggggtctctgaaggtcctctttggcaccccagaatttgtggctcctgaagtgatcaactatgagcccatcggctacgccacagacatgtggagcatcggggtcatctgctacatcctagtcagtggcctttcccccttcatgggagacaacgataacgaaaccttggccaacgttacctcagccacctgggacttcgacgacgaggcattcgatgagatctccgacgatgccaaggatttcatcagcaatctgctgaagaaagatatgaaaaaccgcctggactgcacgcagtgccttcagcatccatggctaatgaaagataccaagaacatggaggccaagaaactctccaaggaccggatgaagaagtacatggcaagaaggaaatggcagaaaacgggcaatgctgtgagagccattggaagactgtcctctatggcaatgatctcagggctcagtggcaggaaatcctcaacagggtcaccaaccagcccgctcaatgcagaaaaactagaatctgaagaagatgtgtcccaagctttccttgaggctgttgctgaggaaaagcctcatgtaaaaccctatttctctaagaccattcgcgatttagaagttgtggagggaagtgctgctagatttgactgcaagattgaaggatacccagaccccgaggttgtctggttcaaagatgaccagtcaatcagggagtcccgccacttccagatagactacgatgaggacgggaactgctctttaattattagtgatgtttgcggggatgacgatgccaagtacacctgcaaggctgtcaacagtcttggagaagccacctgcacagcagagctcattgtggaaacgatggaggaaggtgaaggggaaggggaagaggaagaagagtgaaacaaagccagagaaaagcagtttctaagtcatattaaaaggactatttctctaaaactcaaaaaaaaaaaaaaaactcaagatagtaaaagcacctagtgtgatagattatcggttaggtcatttgtgggttgattcttcagaaacagcagttgatacctagcagcgttattgatgggcattaatctatgttagttggcaccttaagatactagtgcagctagatttcatttagggaaatcaccagtaacttgactgaccaattgattttagagagaaagtaaccaaaccaaatatttatctgggcaaagtcataaattctccacttgaatgcgctcatgaaaaataaggccaaaacaagagttctgggccacagctcagcccagagggttcctggggatgggaggcctctctctccccaccccctgactctagagaactgggttttctcccagtactccagcaattcatttctgaaagcagttgagccactttattccaaagtacactgcagatgttcaaactctccatttctctttccccttccacctgccagttttgctgactctcaacttgtcatgagtgtaagcattaaggacattatgcttcttcgattctgaagacaggtccctgctcatggatgactctggcttccttaggaaaatatttttcttccaaaatcagtaggaaatctaaacttatcccctctttgcagatgtctagcagcttcagacatttggttaagaacccatgggaaaaaaaaaatccttgctaatgtggtttcctttgtaaaccaggattcttatttgtgctgttatagaatatcagctctgaacgtgtggtaaagatttttgtgtttgaatataggagaaatcagtttgctgaaaagttagtcttaattatctattggccacgatgaaacagatttcaactgataaagagctggagaactccatgtactttggaatctcctccaagatagccagagtttaatacatcttcattctcaacactctccaaagaacttgacctaccttatgggttccatatttttcttcttaaatgtgcatcaatcatgccttgcccccaacctttaaatatattcttagacctggtaaatgcactcagacttgcgtctttaggaatttttaactttctttcactacattggcacttaaattttttctttataaagctttttgaaggtcataaacaaagaccataattgatgatagacctaatacatttcctctgtgtgtgtgtgtaacattccaaatactttttttttcttttccactgtttgtaaggtgcaacaatttaatatttttaagggactttttaagagttccttaagaaccaatttaaaattacttcagtgcaatcctacacagtatcaacattagaattttgatattagtcttatgttatcttccattctatttttatctgctttttgctgctagtttcaaactgccagtatttttccttttgcttttaaaatagttacaatatttttcatgatagccacagtattgccacagtttattataataaagggtttttatttgatttagcgcattcaaagcttttttctatcacttttgtgttcagaatataacctttgtgtgcgtgtatgttgtgtgtgtgcatgtgtggcgtatatgtgtgttacaggttaatgccttcttggaattgtgttaatgttctcttggtttattatgccatcagaatggtaaatgagaacactacaactgtagtcagctcacaatttttaaataaaggataccacagtgcatgctgtttgttcaatctttgcagacttctctttctttccatgctaccagttgtaaaggacacagctatatcctggaaatgaaaaacaaacactgtggtgcctagatgtgaagaactggcttatgtggttgtgttttgctatggaacagaatgatttaggaagttcttgtttatataggtagccgaatttacacatttagttcaaaatttctcttgagcatcagcttagtactatatcaatcattctagaaggatatcttatagagcaggtgtccccaacccccggtaagtagcctgttaggaaccaggtcacacataaggaggttagcagtgggcaagtgagcaaagcatcatctatatttacagccgatccccattgctcgcattaccgcctgagctctgcctcctgtcagatcagcggcagcatcaggttctctcaggaacgaactctattgtgaactgctcatgtgagggatctaggtttcacgctccttatgagaatctaacacctgatgatctgtcactgtctcccatcacccctagatgggacagtctagttgcaggaaaacaagctcagggcttccactgattctacattatgatgagttgtatacttattttatattataataaaatatattattacaatgtaataataatagaaataaaatgcacaatacatgtaatgtgcttgaataatcccaaaaccaccccctctcctggtccatggaaaaactgtcttccatgaaagtggtccctggtgccaaaaaggttagggaccactgttacagagtatcaggtcctcaagatgctaaaatctatatgacatttttaacatgtgacattatcatcatcatcatcatcatcatcactgatgatactatttaccagggcatggtttgaattggtgactttggtgcagttcattattggcagccaaatgctttatccataccttcatattgaagaatttgttatcaggaaactaccagtcctgctttacaggaagtctgttatcagatatcagatggcaagttccccatgtcttcagatgttcaaacaatattgtggatggtctagaaagagtttaagacatgctgttaaatgtagggctagataattctctgattctttgatgtagtctggaaagaaacaatccattgtccagttaataaatatttagtgttttcatttttaagacactcacaatccacaaatgtccctaacaatttattatttttaaagaaaatgactttttattccttgctagtgaaaaatgtacaatttatatgctgcactgagaaaaataacagatatactttcttccattcattttcatcccaaacatataaaaaataatccattgattgttccttgcattgcatatcttattaaaagatatttcctacatgcaactaataagacatgctgactgttgtcagctctaaatttatgtaaagattttttatttttgttaaaatgtttgaaatttgctttttgctccacacctcacctgtttttgataaatctgtgctaataagtacataggaggtaataaataattgagttgtgagaaacccaattctccatttttcaagaaaacacaagtagcactactctctttatcccttgggactccttcctgtaatttgaaagggggggctaatgttggtggcagttgttgctaaggatctctgcacagagttagggcttcactctcggcttcctggttagatggggccatgtgactagtcctagtcagtgagctgtgaccagaagtgatgtatgtaccctcgggaccagagcatttatgtgctggtacaagcctctccataatgacgggcaacacatgagatggtggctgctgcagccatctgggtctctagccaacccaaaatggggacataacacaagcaagaaataaacatttgttcttataaatcaccaagattttggggttctcagtggctgcaacataacctagactatcctgatacaggcttatcaccatgttctggatgtgtggtgaccaggatggtagccactactcacaagtggctatttaaatttaagttactttaaaaaataaaataaaaaattcagttcctcagttgtatgagttacatttcaaatgctcgacagtcacatgtacatcacttttcaaattatgtgaaattaaaactgaaaagcttgtgtgaaagtctagagagtatggtctatagtttcatcaattgtattggataatatagtctcgatactcaa

SEQ ID NO: 419 - DNA, 9960 bp, synthetic construct
  misc_feature 1..9960: note = Synthetic
  source 1..9960: mol_type = other DNA
gggctccccgcgccgcccggtcggcagcagggcgctgagcgagctcggagcccgcgctgtgcgcctgcggccggggcgccccgccgagcgccggtgccccggctcccgggccgccttcgccgcgcgggaaggattcttcaaaattaacagaaaccaattcgggccagctgaagagaaaaaataaaggtggctcccggctgcctctgctgcagttcagagcaacttcaggagcttcccagccgagagcttcaggacgcctttcctgtcccactggcccagttgccacaacaaacaacagagaagacggtgaccatgggggatgtgaagctggttgcctcgtcacacatttccaaaacctccctcagtgtggatccctcaagagttgactccatgcccctgacagaggcccctgctttcattttgccccctcggaacctctgcatcaaagaaggagccaccgccaagttcgaagggcgggtccggggttacccagagccccaggtgacatggcacagaaacgggcaacccatcaccagcgggggccgcttcctgctggattgcggcatccgggggactttcagccttgtgattcatgctgtccatgaggaggacaggggaaagtatacctgtgaagccaccaatggcagtggtgctcgccaggtgacagtggagttgacagtagaaggaagttttgcgaagcagcttggtcagcctgttgtttccaaaaccttaggggatagattttcagctccagcagtggagacccgtcctagcatctggggggagtgcccaccaaagtttgctaccaagctgggccgagttgtggtcaaagaaggacagatgggacgattctcctgcaagatcactggccggccccaaccgcaggtcacctggctcaagggaaatgttccactgcagccgagtgcccgtgtgtctgtgtctgagaagaacggcatgcaggttctggaaatccatggagtcaaccaagatgacgtgggagtgtacacgtgcctggtggtgaacgggtcggggaaggcctcgatgtcagctgaactttccatccaaggtttggacagtgccaataggtcatttgtgagagaaacaaaagccaccaattcagatgtcaggaaagaggtgaccaatgtaatctcaaaggagtcgaagctggacagtctggaggctgcagccaaaagcaagaactgctccagcccccagagaggtggctccccaccctgggctgcaaacagccagcctcagcccccaagggagtccaagctggagtcatgcaaggactcgcccagaacggccccgcagaccccggtccttcagaagacttccagctccatcaccctgcaggccgcaagagttcagccggaaccaagagcaccaggcctgggggtcctatcaccttctggagaagagaggaagaggccagctcctccccgtccagccaccttccccaccaggcagcctggcctggggagccaagatgttgtgagcaaggctgctaacaggagaatccccatggagggccagagggattcagcattccccaaatttgagagcaagccccaaagccaggaggtcaaggaaaatcaaactgtcaagttcagatgtgaagtttccgggattccaaagcctgaagtggcctggttcctggaaggcacccccgtgaggagacaggaaggcagcattgaggtttatgaagatgctggctcccattacctctgcctgctgaaagcccggaccagggacagtgggacatacagctgcactgcttccaacgcccaaggccagctgtcctgtagctggaccctccaagtggaaaggcttgccgtgatggaggtggccccctccttctccagtgtcctgaaggactgcgctgttattgagggccaggattttgtgctgcagtgctccgtacgggggaccccagtgccccggatcacttggctgctgaatgggcagcccatccagtacgctcgctccacctgcgaggccggcgtggctgagctccacatccaggatgccctgccggaggaccatggcacctacacctgcctagctgagaatgccttggggcaggtgtcctgcagcgcctgggtcaccgtccatgaaaagaagagtagcaggaagagtgagtaccttctgcctgtggctcccagcaagcccactgcacccatcttcctgcagggcctctctgatctcaaagtcatggatggaagccaggtcactatgactgtccaagtgtcagggaatccaccccctgaagtcatctggctgcacaatgggaatgagatccaagagtcagaggacttccactttgaacagagaggaactcagcacagcctttgtatccaggaagtgttcccggaggacacgggcacgtacacctgcgaggcctggaacagcgctggagaggtccgcacccaggccgtgctcacggtacaagagcctcacgatggcacccagccctggttcatcagtaagcctcgctcagtgacagcctccctgggccagagtgtcctcatctcctgcgccatagctggtgacccctttcctaccgtgcactggctcagagatggcaaagccctctgcaaagacactggccacttcgaggtgcttcagaatgaggacgtgttcaccctggttctaaagaaggtgcagccctggcatgccggccagtatgagatcctgctcaagaaccgggttggcgaatgcagttgccaggtgtcactgatgctacagaacagctctgccagagcccttccacgggggagggagcctgccagctgcgaggacctctgtggtggaggagttggtgctgatggtggtggtagtgaccgctatgggtccctgaggcctggctggccagcaagagggcagggttggctagaggaggaagacggcgaggacgtgcgaggggtgctgaagaggcgcgtggagacgaggcagcacactgaggaggcgatccgccagcaggaggtggagcagctggacttccgagacctcctggggaagaaggtgagtacaaagaccctatcggaagacgacctgaaggagatcccagccgagcagatggatttccgtgccaacctgcagcggcaagtgaagccaaagactgtgtctgaggaagagaggaaggtgcacagcccccagcaggtcgattttcgctctgtcctggccaagaaggggacttccaagacccccgtgcctgagaaggtgccaccgccaaaacctgccaccccggattttcgctcagtgctgggtggcaagaagaaattaccagcagagaatggcagcagcagtgccgagaccctgaatgccaaggcagtggagagttccaagcccctgagcaatgcacagccttcagggcccttgaaacccgtgggcaacgccaagcctgctgagaccctgaagccaatgggcaacgccaagcctgccgagaccctgaagcccatgggcaatgccaagcctgatgagaacctgaaatccgctagcaaagaagaactcaagaaagacgttaagaatgatgtgaactgcaagagaggccatgcagggaccacagataatgaaaagagatcagagagccaggggacagccccagccttcaagcagaagctgcaagatgttcatgtggcagagggcaagaagctgctgctccagtgccaggtgtcttctgaccccccagccaccatcatctggacgctgaacggaaagaccctcaagaccaccaagttcatcatcctctcccaggaaggctcactctgctccgtctccatcgagaaggcactgcctgaggacagaggcttatacaagtgtgtagccaagaatgacgctggccaggcggagtgctcctgccaagtcaccgtggatgatgctccagccagtgagaacaccaaggccccagagatgaaatcccggaggcccaagagctctcttcctcccgtgctaggaactgagagtgatgcgactgtgaaaaagaaacctgcccccaagacacctccgaaggcagcaatgccccctcagatcatccagttccctgaggaccagaaggtacgcgcaggagagtcagtggagctgtttggcaaagtgacaggcactcagcccatcacctgtacctggatgaagttccgaaagcagatccaggaaagcgagcacatgaaggtggagaacagcgagaatggcagcaagctcaccatcctggccgcgcgccaggagcactgcggctgctacacactgctggtggagaacaagctgggcagcaggcaggcccaggtcaacctcactgtcgtggataagccagaccccccagctggcacaccttgtgcctctgacattcggagctcctcactgaccctgtcctggtatggctcctcatatgatgggggcagtgctgtacagtcctacagcatcgagatctgggactcagccaacaagacgtggaaggaactagccacatgccgcagcacctctttcaacgtccaggacctgctgcctgaccacgaatataagttccgtgtacgtgcaatcaacgtgtatggaaccagtgagccaagccaggagtctgaactcacaacggtaggagagaaacctgaagagccgaaggatgaagtggaggtgtcagatgatgatgagaaggagcccgaggttgattaccggacagtgacaatcaatactgaacaaaaagtatctgacttctacgacattgaggagagattaggatctgggaaatttggacaggtctttcgacttgtagaaaagaaaactcgaaaagtctgggcagggaagttcttcaaggcatattcagcaaaagagaaagagaatatccggcaggagattagcatcatgaactgcctccaccaccctaagctggtccagtgtgtggatgcctttgaagaaaaggccaacatcgtcatggtcctggagatcgtgtcaggaggggagctgtttgagcgcatcattgacgaggactttgagctgacggagcgtgagtgcatcaagtacatgcggcagatctcggagggagtggagtacatccacaagcagggcatcgtgcacctggacctcaagccggagaacatcatgtgtgtcaacaagacgggcaccaggatcaagctcatcgactttggtctggccaggaggctggagaatgcggggtctctgaaggtcctctttggcaccccagaatttgtggctcctgaagtgatcaactatgagcccatcggctacgccacagacatgtggagcatcggggtcatctgctacatcctaaaccgcctggactgcacgcagtgccttcagcatccatggctaatgaaagataccaagaacatggaggccaagaaactctccaaggaccggatgaagaagtacatggcaagaaggaaatggcagaaaacgggcaatgctgtgagagccattggaagactgtcctctatggcaatgatctcagggctcagtggcaggaaatcctcaacagggtcaccaaccagcccgctcaatgcagaaaaactagaatctgaagaagatgtgtcccaagctttccttgaggctgttgctgaggaaaagcctcatgtaaaaccctatttctctaagaccattcgcgatttagaagttgtggagggaagtgctgctagatttgactgcaagattgaaggatacccagaccccgaggttgtctggttcaaagatgaccagtcaatcagggagtcccgccacttccagatagactacgatgaggacgggaactgctctttaattattagtgatgtttgcggggatgacgatgccaagtacacctgcaaggctgtcaacagtcttggagaagccacctgcacagcagagctcattgtggaaacgatggaggaaggtgaaggggaaggggaagaggaagaagagtgaaacaaagccagagaaaagcagtttctaagtcatattaaaaggactatttctctaaaactcaaaaaaaaaaaaaaaactcaagatagtaaaagcacctagtgtgatagattatcggttaggtcatttgtgggttgattcttcagaaacagcagttgatacctagcagcgttattgatgggcattaatctatgttagttggcaccttaagatactagtgcagctagatttcatttagggaaatcaccagtaacttgactgaccaattgattttagagagaaagtaaccaaaccaaatatttatctgggcaaagtcataaattctccacttgaatgcgctcatgaaaaataaggccaaaacaagagttctgggccacagctcagcccagagggttcctggggatgggaggcctctctctccccaccccctgactctagagaactgggttttctcccagtactccagcaattcatttctgaaagcagttgagccactttattccaaagtacactgcagatgttcaaactctccatttctctttccccttccacctgccagttttgctgactctcaacttgtcatgagtgtaagcattaaggacattatgcttcttcgattctgaagacaggtccctgctcatggatgactctggcttccttaggaaaatatttttcttccaaaatcagtaggaaatctaaacttatcccctctttgcagatgtctagcagcttcagacatttggttaagaacccatgggaaaaaaaaaatccttgctaatgtggtttcctttgtaaaccaggattcttatttgtgctgttatagaatatcagctctgaacgtgtggtaaagatttttgtgtttgaatataggagaaatcagtttgctgaaaagttagtcttaattatctattggccacgatgaaacagatttcaactgataaagagctggagaactccatgtactttggaatctcctccaagatagccagagtttaatacatcttcattctcaacactctccaaagaacttgacctaccttatgggttccatatttttcttcttaaatgtgcatcaatcatgccttgcccccaacctttaaatatattcttagacctggtaaatgcactcagacttgcgtctttaggaatttttaactttctttcactacattggcacttaaattttttctttataaagctttttgaaggtcataaacaaagaccataattgatgatagacctaatacatttcctctgtgtgtgtgtgtaacattccaaatactttttttttcttttccactgtttgtaaggtgcaacaatttaatatttttaagggactttttaagagttccttaagaaccaatttaaaattacttcagtgcaatcctacacagtatcaacattagaattttgatattagtcttatgttatcttccattctatttttatctgctttttgctgctagtttcaaactgccagtatttttccttttgcttttaaaatagttacaatatttttcatgatagccacagtattgccacagtttattataataaagggtttttatttgatttagcgcattcaaagcttttttctatcacttttgtgttcagaatataacctttgtgtgcgtgtatgttgtgtgtgtgcatgtgtggcgtatatgtgtgttacaggttaatgccttcttggaattgtgttaatgttctcttggtttattatgccatcagaatggtaaatgagaacactacaactgtagtcagctcacaatttttaaataaaggataccacagtgcatgctgtttgttcaatctttgcagacttctctttctttccatgctaccagttgtaaaggacacagctatatcctggaaatgaaaaacaaacactgtggtgcctagatgtgaagaactggcttatgtggttgtgttttgctatggaacagaatgatttaggaagttcttgtttatataggtagccgaatttacacatttagttcaaaatttctcttgagcatcagcttagtactatatcaatcattctagaaggatatcttatagagcaggtgtccccaacccccggtaagtagcctgttaggaaccaggtcacacataaggaggttagcagtgggcaagtgagcaaagcatcatctatatttacagccgatccccattgctcgcattaccgcctgagctctgcctcctgtcagatcagcggcagcatcaggttctctcaggaacgaactctattgtgaactgctcatgtgagggatctaggtttcacgctccttatgagaatctaacacctgatgatctgtcactgtctcccatcacccctagatgggacagtctagttgcaggaaaacaagctcagggcttccactgattctacattatgatgagttgtatacttattttatattataataaaatatattattacaatgtaataataatagaaataaaatgcacaatacatgtaatgtgcttgaataatcccaaaaccaccccctctcctggtccatggaaaaactgtcttccatgaaagtggtccctggtgccaaaaaggttagggaccactgttacagagtatcaggtcctcaagatgctaaaatctatatgacatttttaacatgtgacattatcatcatcatcatcatcatcatcactgatgatactatttaccagggcatggtttgaattggtgactttggtgcagttcattattggcagccaaatgctttatccataccttcatattgaagaatttgttatcaggaaactaccagtcctgctttacaggaagtctgttatcagatatcagatggcaagttccccatgtcttcagatgttcaaacaatattgtggatggtctagaaagagtttaagacatgctgttaaatgtagggctagataattctctgattctttgatgtagtctggaaagaaacaatccattgtccagttaataaatatttagtgttttcatttttaagacactcacaatccacaaatgtccctaacaatttattatttttaaagaaaatgactttttattccttgctagtgaaaaatgtacaatttatatgctgcactgagaaaaataacagatatactttcttccattcattttcatcccaaacatataaaaaataatccattgattgttccttgcattgcatatcttattaaaagatatttcctacatgcaactaataagacatgctgactgttgtcagctctaaatttatgtaaagattttttatttttgttaaaatgtttgaaatttgctttttgctccacacctcacctgtttttgataaatctgtgctaataagtacataggaggtaataaataattgagttgtgagaaacccaattctccatttttcaagaaaacacaagtagcactactctctttatcccttgggactccttcctgtaatttgaaagggggggctaatgttggtggcagttgttgctaaggatctctgcacagagttagggcttcactctcggcttcctggttagatggggccatgtgactagtcctagtcagtgagctgtgaccagaagtgatgtatgtaccctcgggaccagagcatttatgtgctggtacaagcctctccataatgacgggcaacacatgagatggtggctgctgcagccatctgggtctctagccaacccaaaatggggacataacacaagcaagaaataaacatttgttcttataaatcaccaagattttggggttctcagtggctgcaacataacctagactatcctgatacaggcttatcaccatgttctggatgtgtggtgaccaggatggtagccactactcacaagtggctatttaaatttaagttactttaaaaaataaaataaaaaattcagttcctcagttgtatgagttacatttcaaatgctcgacagtcacatgtacatcacttttcaaattatgtgaaattaaaactgaaaagcttgtgtgaaagtctagagagtatggtctatagtttcatcaattgtattggataatatagtctcgatactcaa

SEQ ID NO: 420 - DNA, 9753 bp, synthetic construct
  misc_feature 1..9753: note = Synthetic
  source 1..9753: mol_type = other DNA
gggctccccgcgccgcccggtcggcagcagggcgctgagcgagctcggagcccgcgctgtgcgcctgcggccggggcgccccgccgagcgccggtgccccggctcccgggccgccttcgccgcgcgggaaggattcttcaaaattaacagaaaccaattcgggccagctgaagagaaaaaataaaggtggctcccggctgcctctgctgcagttcagagcaacttcaggagcttcccagccgagagcttcaggacgcctttcctgtcccactggcccagttgccacaacaaacaacagagaagacggtgaccatgggggatgtgaagctggttgcctcgtcacacatttccaaaacctccctcagtgtggatccctcaagagttgactccatgcccctgacagaggcccctgctttcattttgccccctcggaacctctgcatcaaagaaggagccaccgccaagttcgaagggcgggtccggggttacccagagccccaggtgacatggcacagaaacgggcaacccatcaccagcgggggccgcttcctgctggattgcggcatccgggggactttcagccttgtgattcatgctgtccatgaggaggacaggggaaagtatacctgtgaagccaccaatggcagtggtgctcgccaggtgacagtggagttgacagtagaaggaagttttgcgaagcagcttggtcagcctgttgtttccaaaaccttaggggatagattttcagctccagcagtggagacccgtcctagcatctggggggagtgcccaccaaagtttgctaccaagctgggccgagttgtggtcaaagaaggacagatgggacgattctcctgcaagatcactggccggccccaaccgcaggtcacctggctcaagggaaatgttccactgcagccgagtgcccgtgtgtctgtgtctgagaagaacggcatgcaggttctggaaatccatggagtcaaccaagatgacgtgggagtgtacacgtgcctggtggtgaacgggtcggggaaggcctcgatgtcagctgaactttccatccaaggtttggacagtgccaataggtcatttgtgagagaaacaaaagccaccaattcagatgtcaggaaagaggtgaccaatgtaatctcaaaggagtcgaagctggacagtctggaggctgcagccaaaagcaagaactgctccagcccccagagaggtggctccccaccctgggctgcaaacagccagcctcagcccccaagggagtccaagctggagtcatgcaaggactcgcccagaacggccccgcagaccccggtccttcagaagacttccagctccatcaccctgcaggccgcaagagttcagccggaaccaagagcaccaggcctgggggtcctatcaccttctggagaagagaggaagaggccagctcctccccgtccagccaccttccccaccaggcagcctggcctggggagccaagatgttgtgagcaaggctgctaacaggagaatccccatggagggccagagggattcagcattccccaaatttgagagcaagccccaaagccaggaggtcaaggaaaatcaaactgtcaagttcagatgtgaagggcttgccgtgatggaggtggccccctccttctccagtgtcctgaaggactgcgctgttattgagggccaggattttgtgctgcagtgctccgtacgggggaccccagtgccccggatcacttggctgctgaatgggcagcccatccagtacgctcgctccacctgcgaggccggcgtggctgagctccacatccaggatgccctgccggaggaccatggcacctacacctgcctagctgagaatgccttggggcaggtgtcctgcagcgcctgggtcaccgtccatgaaaagaagagtagcaggaagagtgagtaccttctgcctgtggctcccagcaagcccactgcacccatcttcctgcagggcctctctgatctcaaagtcatggatggaagccaggtcactatgactgtccaagtgtcagggaatccaccccctgaagtcatctggctgcacaatgggaatgagatccaagagtcagaggacttccactttgaacagagaggaactcagcacagcctttgtatccaggaagtgttcccggaggacacgggcacgtacacctgcgaggcctggaacagcgctggagaggtccgcacccaggccgtgctcacggtacaagagcctcacgatggcacccagccctggttcatcagtaagcctcgctcagtgacagcctccctgggccagagtgtcctcatctcctgcgccatagctggtgacccctttcctaccgtgcactggctcagagatggcaaagccctctgcaaagacactggccacttcgaggtgcttcagaatgaggacgtgttcaccctggttctaaagaaggtgcagccctggcatgccggccagtatgagatcctgctcaagaaccgggttggcgaatgcagttgccaggtgtcactgatgctacagaacagctctgccagagcccttccacgggggagggagcctgccagctgcgaggacctctgtggtggaggagttggtgctgatggtggtggtagtgaccgctatgggtccctgaggcctggctggccagcaagagggcagggttggctagaggaggaagacggcgaggacgtgcgaggggtgctgaagaggcgcgtggagacgaggcagcacactgaggaggcgatccgccagcaggaggtggagcagctggacttccgagacctcctggggaagaaggtgagtacaaagaccctatcggaagacgacctgaaggagatcccagccgagcagatggatttccgtgccaacctgcagcggcaagtgaagccaaagactgtgtctgaggaagagaggaaggtgcacagcccccagcaggtcgattttcgctctgtcctggccaagaaggggacttccaagacccccgtgcctgagaaggtgccaccgccaaaacctgccaccccggattttcgctcagtgctgggtggcaagaagaaattaccagcagagaatggcagcagcagtgccgagaccctgaatgccaaggcagtggagagttccaagcccctgagcaatgcacagccttcagggcccttgaaacccgtgggcaacgccaagcctgctgagaccctgaagccaatgggcaacgccaagcctgccgagaccctgaagcccatgggcaatgccaagcctgatgagaacctgaaatccgctagcaaagaagaactcaagaaagacgttaagaatgatgtgaactgcaagagaggccatgcagggaccacagataatgaaaagagatcagagagccaggggacagccccagccttcaagcagaagctgcaagatgttcatgtggcagagggcaagaagctgctgctccagtgccaggtgtcttctgaccccccagccaccatcatctggacgctgaacggaaagaccctcaagaccaccaagttcatcatcctctcccaggaaggctcactctgctccgtctccatcgagaaggcactgcctgaggacagaggcttatacaagtgtgtagccaagaatgacgctggccaggcggagtgctcctgccaagtcaccgtggatgatgctccagccagtgagaacaccaaggccccagagatgaaatcccggaggcccaagagctctcttcctcccgtgctaggaactgagagtgatgcgactgtgaaaaagaaacctgcccccaagacacctccgaaggcagcaatgccccctcagatcatccagttccctgaggaccagaaggtacgcgcaggagagtcagtggagctgtttggcaaagtgacaggcactcagcccatcacctgtacctggatgaagttccgaaagcagatccaggaaagcgagcacatgaaggtggagaacagcgagaatggcagcaagctcaccatcctggccgcgcgccaggagcactgcggctgctacacactgctggtggagaacaagctgggcagcaggcaggcccaggtcaacctcactgtcgtggataagccagaccccccagctggcacaccttgtgcctctgacattcggagctcctcactgaccctgtcctggtatggctcctcatatgatgggggcagtgctgtacagtcctacagcatcgagatctgggactcagccaacaagacgtggaaggaactagccacatgccgcagcacctctttcaacgtccaggacctgctgcctgaccacgaatataagttccgtgtacgtgcaatcaacgtgtatggaaccagtgagccaagccaggagtctgaactcacaacggtaggagagaaacctgaagagccgaaggatgaagtggaggtgtcagatgatgatgagaaggagcccgaggttgattaccggacagtgacaatcaatactgaacaaaaagtatctgacttctacgacattgaggagagattaggatctgggaaatttggacaggtctttcgacttgtagaaaagaaaactcgaaaagtctgggcagggaagttcttcaaggcatattcagcaaaagagaaagagaatatccggcaggagattagcatcatgaactgcctccaccaccctaagctggtccagtgtgtggatgcctttgaagaaaaggccaacatcgtcatggtcctggagatcgtgtcaggaggggagctgtttgagcgcatcattgacgaggactttgagctgacggagcgtgagtgcatcaagtacatgcggcagatctcggagggagtggagtacatccacaagcagggcatcgtgcacctggacctcaagccggagaacatcatgtgtgtcaacaagacgggcaccaggatcaagctcatcgactttggtctggccaggaggctggagaatgcggggtctctgaaggtcctctttggcaccccagaatttgtggctcctgaagtgatcaactatgagcccatcggctacgccacagacatgtggagcatcggggtcatctgctacatcctaaaccgcctggactgcacgcagtgccttcagcatccatggctaatgaaagataccaagaacatggaggccaagaaactctccaaggaccggatgaagaagtacatggcaagaaggaaatggcagaaaacgggcaatgctgtgagagccattggaagactgtcctctatggcaatgatctcagggctcagtggcaggaaatcctcaacagggtcaccaaccagcccgctcaatgcagaaaaactagaatctgaagaagatgtgtcccaagctttccttgaggctgttgctgaggaaaagcctcatgtaaaaccctatttctctaagaccattcgcgatttagaagttgtggagggaagtgctgctagatttgactgcaagattgaaggatacccagaccccgaggttgtctggttcaaagatgaccagtcaatcagggagtcccgccacttccagatagactacgatgaggacgggaactgctctttaattattagtgatgtttgcggggatgacgatgccaagtacacctgcaaggctgtcaacagtcttggagaagccacctgcacagcagagctcattgtggaaacgatggaggaaggtgaaggggaaggggaagaggaagaagagtgaaacaaagccagagaaaagcagtttctaagtcatattaaaaggactatttctctaaaactcaaaaaaaaaaaaaaaactcaagatagtaaaagcacctagtgtgatagattatcggttaggtcatttgtgggttgattcttcagaaacagcagttgatacctagcagcgttattgatgggcattaatctatgttagttggcaccttaagatactagtgcagctagatttcatttagggaaatcaccagtaacttgactgaccaattgattttagagagaaagtaaccaaaccaaatatttatctgggcaaagtcataaattctccacttgaatgcgctcatgaaaaataaggccaaaacaagagttctgggccacagctcagcccagagggttcctggggatgggaggcctctctctccccaccccctgactctagagaactgggttttctcccagtactccagcaattcatttctgaaagcagttgagccactttattccaaagtacactgcagatgttcaaactctccatttctctttccccttccacctgccagttttgctgactctcaacttgtcatgagtgtaagcattaaggacattatgcttcttcgattctgaagacaggtccctgctcatggatgactctggcttccttaggaaaatatttttcttccaaaatcagtaggaaatctaaacttatcccctctttgcagatgtctagcagcttcagacatttggttaagaacccatgggaaaaaaaaaatccttgctaatgtggtttcctttgtaaaccaggattcttatttgtgctgttatagaatatcagctctgaacgtgtggtaaagatttttgtgtttgaatataggagaaatcagtttgctgaaaagttagtcttaattatctattggccacgatgaaacagatttcaactgataaagagctggagaactccatgtactttggaatctcctccaagatagccagagtttaatacatcttcattctcaacactctccaaagaacttgacctaccttatgggttccatatttttcttcttaaatgtgcatcaatcatgccttgcccccaacctttaaatatattcttagacctggtaaatgcactcagacttgcgtctttaggaatttttaactttctttcactacattggcacttaaattttttctttataaagctttttgaaggtcataaacaaagaccataattgatgatagacctaatacatttcctctgtgtgtgtgtgtaacattccaaatactttttttttcttttccactgtttgtaaggtgcaacaatttaatatttttaagggactttttaagagttccttaagaaccaatttaaaattacttcagtgcaatcctacacagtatcaacattagaattttgatattagtcttatgttatcttccattctatttttatctgctttttgctgctagtttcaaactgccagtatttttccttttgcttttaaaatagttacaatatttttcatgatagccacagtattgccacagtttattataataaagggtttttatttgatttagcgcattcaaagcttttttctatcacttttgtgttcagaatataacctttgtgtgcgtgtatgttgtgtgtgtgcatgtgtggcgtatatgtgtgttacaggttaatgccttcttggaattgtgttaatgttctcttggtttattatgccatcagaatggtaaatgagaacactacaactgtagtcagctcacaatttttaaataaaggataccacagtgcatgctgtttgttcaatctttgcagacttctctttctttccatgctaccagttgtaaaggacacagctatatcctggaaatgaaaaacaaacactgtggtgcctagatgtgaagaactggcttatgtggttgtgttttgctatggaacagaatgatttaggaagttcttgtttatataggtagccgaatttacacatttagttcaaaatttctcttgagcatcagcttagtactatatcaatcattctagaaggatatcttatagagcaggtgtccccaacccccggtaagtagcctgttaggaaccaggtcacacataaggaggttagcagtgggcaagtgagcaaagcatcatctatatttacagccgatccccattgctcgcattaccgcctgagctctgcctcctgtcagatcagcggcagcatcaggttctctcaggaacgaactctattgtgaactgctcatgtgagggatctaggtttcacgctccttatgagaatctaacacctgatgatctgtcactgtctcccatcacccctagatgggacagtctagttgcaggaaaacaagctcagggcttccactgattctacattatgatgagttgtatacttattttatattataataaaatatattattacaatgtaataataatagaaataaaatgcacaatacatgtaatgtgcttgaataatcccaaaaccaccccctctcctggtccatggaaaaactgtcttccatgaaagtggtccctggtgccaaaaaggttagggaccactgttacagagtatcaggtcctcaagatgctaaaatctatatgacatttttaacatgtgacattatcatcatcatcatcatcatcatcactgatgatactatttaccagggcatggtttgaattggtgactttggtgcagttcattattggcagccaaatgctttatccataccttcatattgaagaatttgttatcaggaaactaccagtcctgctttacaggaagtctgttatcagatatcagatggcaagttccccatgtcttcagatgttcaaacaatattgtggatggtctagaaagagtttaagacatgctgttaaatgtagggctagataattctctgattctttgatgtagtctggaaagaaacaatccattgtccagttaataaatatttagtgttttcatttttaagacactcacaatccacaaatgtccctaacaatttattatttttaaagaaaatgactttttattccttgctagtgaaaaatgtacaatttatatgctgcactgagaaaaataacagatatactttcttccattcattttcatcccaaacatataaaaaataatccattgattgttccttgcattgcatatcttattaaaagatatttcctacatgcaactaataagacatgctgactgttgtcagctctaaatttatgtaaagattttttatttttgttaaaatgtttgaaatttgctttttgctccacacctcacctgtttttgataaatctgtgctaataagtacataggaggtaataaataattgagttgtgagaaacccaattctccatttttcaagaaaacacaagtagcactactctctttatcccttgggactccttcctgtaatttgaaagggggggctaatgttggtggcagttgttgctaaggatctctgcacagagttagggcttcactctcggcttcctggttagatggggccatgtgactagtcctagtcagtgagctgtgaccagaagtgatgtatgtaccctcgggaccagagcatttatgtgctggtacaagcctctccataatgacgggcaacacatgagatggtggctgctgcagccatctgggtctctagccaacccaaaatggggacataacacaagcaagaaataaacatttgttcttataaatcaccaagattttggggttctcagtggctgcaacataacctagactatcctgatacaggcttatcaccatgttctggatgtgtggtgaccaggatggtagccactactcacaagtggctatttaaatttaagttactttaaaaaataaaataaaaaattcagttcctcagttgtatgagttacatttcaaatgctcgacagtcacatgtacatcacttttcaaattatgtgaaattaaaactgaaaagcttgtgtgaaagtctagagagtatggtctatagtttcatcaattgtattggataatatagtctcgatactcaa

SEQ ID NO: 421 - DNA, 4772 bp, synthetic construct
  misc_feature 1..4772: note = Synthetic
  source 1..4772: mol_type = other DNA
attccattctctgaacatcttctgacacactgacagtgctgagcagagcaaggttgggttcgctcctctggcagaacctcggctctcaggaggtccttgttccagggaacagctgcttctctggggctgggctctactccctgcagcccctcgcactacccagctggaaccagggacaacgcctgagtccaaccctcgtgtctattttccagaaaacgggcaatgctgtgagagccattggaagactgtcctctatggcaatgatctcagggctcagtggcaggaaatcctcaacagggtcaccaaccagcccgctcaatgcagaaaaactagaatctgaagatgtgtcccaagctttccttgaggctgttgctgaggaaaagcctcatgtaaaaccctatttctctaagaccattcgcgatttagaagttgtggagggaagtgctgctagatttgactgcaagattgaaggatacccagaccccgaggttgtctggttcaaagatgaccagtcaatcagggagtcccgccacttccagatagactacgatgaggacgggaactgctctttaattattagtgatgtttgcggggatgacgatgccaagtacacctgcaaggctgtcaacagtcttggagaagccacctgcacagcagagctcattgtggaaacgatggaggaaggtgaaggggaaggggaagaggaagaagagtgaaacaaagccagagaaaagcagtttctaagtcatattaaaaggactatttctctaaaactcaaaaaaaaaaaaaaaactcaagatagtaaaagcacctagtgtgatagattatcggttaggtcatttgtgggttgattcttcagaaacagcagttgatacctagcagcgttattgatgggcattaatctatgttagttggcaccttaagatactagtgcagctagatttcatttagggaaatcaccagtaacttgactgaccaattgattttagagagaaagtaaccaaaccaaatatttatctgggcaaagtcataaattctccacttgaatgcgctcatgaaaaataaggccaaaacaagagttctgggccacagctcagcccagagggttcctggggatgggaggcctctctctccccaccccctgactctagagaactgggttttctcccagtactccagcaattcatttctgaaagcagttgagccactttattccaaagtacactgcagatgttcaaactctccatttctctttccccttccacctgccagttttgctgactctcaacttgtcatgagtgtaagcattaaggacattatgcttcttcgattctgaagacaggtccctgctcatggatgactctggcttccttaggaaaatatttttcttccaaaatcagtaggaaatctaaacttatcccctctttgcagatgtctagcagcttcagacatttggttaagaacccatgggaaaaaaaaaatccttgctaatgtggtttcctttgtaaaccaggattcttatttgtgctgttatagaatatcagctctgaacgtgtggtaaagatttttgtgtttgaatataggagaaatcagtttgctgaaaagttagtcttaattatctattggccacgatgaaacagatttcaactgataaagagctggagaactccatgtactttggaatctcctccaagatagccagagtttaatacatcttcattctcaacactctccaaagaacttgacctaccttatgggttccatatttttcttcttaaatgtgcatcaatcatgccttgcccccaacctttaaatatattcttagacctggtaaatgcactcagacttgcgtctttaggaatttttaactttctttcactacattggcacttaaattttttctttataaagctttttgaaggtcataaacaaagaccataattgatgatagacctaatacatttcctctgtgtgtgtgtgtaacattccaaatactttttttttcttttccactgtttgtaaggtgcaacaatttaatatttttaagggactttttaagagttccttaagaaccaatttaaaattacttcagtgcaatcctacacagtatcaacattagaattttgatattagtcttatgttatcttccattctatttttatctgctttttgctgctagtttcaaactgccagtatttttccttttgcttttaaaatagttacaatatttttcatgatagccacagtattgccacagtttattataataaagggtttttatttgatttagcgcattcaaagcttttttctatcacttttgtgttcagaatataacctttgtgtgcgtgtatgttgtgtgtgtgcatgtgtggcgtatatgtgtgttacaggttaatgccttcttggaattgtgttaatgttctcttggtttattatgccatcagaatggtaaatgagaacactacaactgtagtcagctcacaatttttaaataaaggataccacagtgcatgctgtttgttcaatctttgcagacttctctttctttccatgctaccagttgtaaaggacacagctatatcctggaaatgaaaaacaaacactgtggtgcctagatgtgaagaactggcttatgtggttgtgttttgctatggaacagaatgatttaggaagttcttgtttatataggtagccgaatttacacatttagttcaaaatttctcttgagcatcagcttagtactatatcaatcattctagaaggatatcttatagagcaggtgtccccaacccccggtaagtagcctgttaggaaccaggtcacacataaggaggttagcagtgggcaagtgagcaaagcatcatctatatttacagccgatccccattgctcgcattaccgcctgagctctgcctcctgtcagatcagcggcagcatcaggttctctcaggaacgaactctattgtgaactgctcatgtgagggatctaggtttcacgctccttatgagaatctaacacctgatgatctgtcactgtctcccatcacccctagatgggacagtctagttgcaggaaaacaagctcagggcttccactgattctacattatgatgagttgtatacttattttatattataataaaatatattattacaatgtaataataatagaaataaaatgcacaatacatgtaatgtgcttgaataatcccaaaaccaccccctctcctggtccatggaaaaactgtcttccatgaaagtggtccctggtgccaaaaaggttagggaccactgttacagagtatcaggtcctcaagatgctaaaatctatatgacatttttaacatgtgacattatcatcatcatcatcatcatcatcactgatgatactatttaccagggcatggtttgaattggtgactttggtgcagttcattattggcagccaaatgctttatccataccttcatattgaagaatttgttatcaggaaactaccagtcctgctttacaggaagtctgttatcagatatcagatggcaagttccccatgtcttcagatgttcaaacaatattgtggatggtctagaaagagtttaagacatgctgttaaatgtagggctagataattctctgattctttgatgtagtctggaaagaaacaatccattgtccagttaataaatatttagtgttttcatttttaagacactcacaatccacaaatgtccctaacaatttattatttttaaagaaaatgactttttattccttgctagtgaaaaatgtacaatttatatgctgcactgagaaaaataacagatatactttcttccattcattttcatcccaaacatataaaaaataatccattgattgttccttgcattgcatatcttattaaaagatatttcctacatgcaactaataagacatgctgactgttgtcagctctaaatttatgtaaagattttttatttttgttaaaatgtttgaaatttgctttttgctccacacctcacctgtttttgataaatctgtgctaataagtacataggaggtaataaataattgagttgtgagaaacccaattctccatttttcaagaaaacacaagtagcactactctctttatcccttgggactccttcctgtaatttgaaagggggggctaatgttggtggcagttgttgctaaggatctctgcacagagttagggcttcactctcggcttcctggttagatggggccatgtgactagtcctagtcagtgagctgtgaccagaagtgatgtatgtaccctcgggaccagagcatttatgtgctggtacaagcctctccataatgacgggcaacacatgagatggtggctgctgcagccatctgggtctctagccaacccaaaatggggacataacacaagcaagaaataaacatttgttcttataaatcaccaagattttggggttctcagtggctgcaacataacctagactatcctgatacaggcttatcaccatgttctggatgtgtggtgaccaggatggtagccactactcacaagtggctatttaaatttaagttactttaaaaaataaaataaaaaattcagttcctcagttgtatgagttacatttcaaatgctcgacagtcacatgtacatcacttttcaaattatgtgaaattaaaactgaaaagcttgtgtgaaagtctagagagtatggtctatagtttcatcaattgtattggataatatagtctcgatactcaa

SEQ ID NO: 422 - DNA, 4775 bp, synthetic construct
  misc_feature 1..4775: note = Synthetic
  source 1..4775: mol_type = other DNA
attccattctctgaacatcttctgacacactgacagtgctgagcagagcaaggttgggttcgctcctctggcagaacctcggctctcaggaggtccttgttccagggaacagctgcttctctggggctgggctctactccctgcagcccctcgcactacccagctggaaccagggacaacgcctgagtccaaccctcgtgtctattttccagaaaacgggcaatgctgtgagagccattggaagactgtcctctatggcaatgatctcagggctcagtggcaggaaatcctcaacagggtcaccaaccagcccgctcaatgcagaaaaactagaatctgaagaagatgtgtcccaagctttccttgaggctgttgctgaggaaaagcctcatgtaaaaccctatttctctaagaccattcgcgatttagaagttgtggagggaagtgctgctagatttgactgcaagattgaaggatacccagaccccgaggttgtctggttcaaagatgaccagtcaatcagggagtcccgccacttccagatagactacgatgaggacgggaactgctctttaattattagtgatgtttgcggggatgacgatgccaagtacacctgcaaggctgtcaacagtcttggagaagccacctgcacagcagagctcattgtggaaacgatggaggaaggtgaaggggaaggggaagaggaagaagagtgaaacaaagccagagaaaagcagtttctaagtcatattaaaaggactatttctctaaaactcaaaaaaaaaaaaaaaactcaagatagtaaaagcacctagtgtgatagattatcggttaggtcatttgtgggttgattcttcagaaacagcagttgatacctagcagcgttattgatgggcattaatctatgttagttggcaccttaagatactagtgcagctagatttcatttagggaaatcaccagtaacttgactgaccaattgattttagagagaaagtaaccaaaccaaatatttatctgggcaaagtcataaattctccacttgaatgcgctcatgaaaaataaggccaaaacaagagttctgggccacagctcagcccagagggttcctggggatgggaggcctctctctccccaccccctgactctagagaactgggttttctcccagtactccagcaattcatttctgaaagcagttgagccactttattccaaagtacactgcagatgttcaaactctccatttctctttccccttccacctgccagttttgctgactctcaacttgtcatgagtgtaagcattaaggacattatgcttcttcgattctgaagacaggtccctgctcatggatgactctggcttccttaggaaaatatttttcttccaaaatcagtaggaaatctaaacttatcccctctttgcagatgtctagcagcttcagacatttggttaagaacccatgggaaaaaaaaaatccttgctaatgtggtttcctttgtaaaccaggattcttatttgtgctgttatagaatatcagctctgaacgtgtggtaaagatttttgtgtttgaatataggagaaatcagtttgctgaaaagttagtcttaattatctattggccacgatgaaacagatttcaactgataaagagctggagaactccatgtactttggaatctcctccaagatagccagagtttaatacatcttcattctcaacactctccaaagaacttgacctaccttatgggttccatatttttcttcttaaatgtgcatcaatcatgccttgcccccaacctttaaatatattcttagacctggtaaatgcactcagacttgcgtctttaggaatttttaactttctttcactacattggcacttaaattttttctttataaagctttttgaaggtcataaacaaagaccataattgatgatagacctaatacatttcctctgtgtgtgtgtgtaacattccaaatactttttttttcttttccactgtttgtaaggtgcaacaatttaatatttttaagggactttttaagagttccttaagaaccaatttaaaattacttcagtgcaatcctacacagtatcaacattagaattttgatattagtcttatgttatcttccattctatttttatctgctttttgctgctagtttcaaactgccagtatttttccttttgcttttaaaatagttacaatatttttcatgatagccacagtattgccacagtttattataataaagggtttttatttgatttagcgcattcaaagcttttttctatcacttttgtgttcagaatataacctttgtgtgcgtgtatgttgtgtgtgtgcatgtgtggcgtatatgtgtgttacaggttaatgccttcttggaattgtgttaatgttctcttggtttattatgccatcagaatggtaaatgagaacactacaactgtagtcagctcacaatttttaaataaaggataccacagtgcatgctgtttgttcaatctttgcagacttctctttctttccatgctaccagttgtaaaggacacagctatatcctggaaatgaaaaacaaacactgtggtgcctagatgtgaagaactggcttatgtggttgtgttttgctatggaacagaatgatttaggaagttcttgtttatataggtagccgaatttacacatttagttcaaaatttctcttgagcatcagcttagtactatatcaatcattctagaaggatatcttatagagcaggtgtccccaacccccggtaagtagcctgttaggaaccaggtcacacataaggaggttagcagtgggcaagtgagcaaagcatcatctatatttacagccgatccccattgctcgcattaccgcctgagctctgcctcctgtcagatcagcggcagcatcaggttctctcaggaacgaactctattgtgaactgctcatgtgagggatctaggtttcacgctccttatgagaatctaacacctgatgatctgtcactgtctcccatcacccctagatgggacagtctagttgcaggaaaacaagctcagggcttccactgattctacattatgatgagttgtatacttattttatattataataaaatatattattacaatgtaataataatagaaataaaatgcacaatacatgtaatgtgcttgaataatcccaaaaccaccccctctcctggtccatggaaaaactgtcttccatgaaagtggtccctggtgccaaaaaggttagggaccactgttacagagtatcaggtcctcaagatgctaaaatctatatgacatttttaacatgtgacattatcatcatcatcatcatcatcatcactgatgatactatttaccagggcatggtttgaattggtgactttggtgcagttcattattggcagccaaatgctttatccataccttcatattgaagaatttgttatcaggaaactaccagtcctgctttacaggaagtctgttatcagatatcagatggcaagttccccatgtcttcagatgttcaaacaatattgtggatggtctagaaagagtttaagacatgctgttaaatgtagggctagataattctctgattctttgatgtagtctggaaagaaacaatccattgtccagttaataaatatttagtgttttcatttttaagacactcacaatccacaaatgtccctaacaatttattatttttaaagaaaatgactttttattccttgctagtgaaaaatgtacaatttatatgctgcactgagaaaaataacagatatactttcttccattcattttcatcccaaacatataaaaaataatccattgattgttccttgcattgcatatcttattaaaagatatttcctacatgcaactaataagacatgctgactgttgtcagctctaaatttatgtaaagattttttatttttgttaaaatgtttgaaatttgctttttgctccacacctcacctgtttttgataaatctgtgctaataagtacataggaggtaataaataattgagttgtgagaaacccaattctccatttttcaagaaaacacaagtagcactactctctttatcccttgggactccttcctgtaatttgaaagggggggctaatgttggtggcagttgttgctaaggatctctgcacagagttagggcttcactctcggcttcctggttagatggggccatgtgactagtcctagtcagtgagctgtgaccagaagtgatgtatgtaccctcgggaccagagcatttatgtgctggtacaagcctctccataatgacgggcaacacatgagatggtggctgctgcagccatctgggtctctagccaacccaaaatggggacataacacaagcaagaaataaacatttgttcttataaatcaccaagattttggggttctcagtggctgcaacataacctagactatcctgatacaggcttatcaccatgttctggatgtgtggtgaccaggatggtagccactactcacaagtggctatttaaatttaagttactttaaaaaataaaataaaaaattcagttcctcagttgtatgagttacatttcaaatgctcgacagtcacatgtacatcacttttcaaattatgtgaaattaaaactgaaaagcttgtgtgaaagtctagagagtatggtctatagtttcatcaattgtattggataatatagtctcgatactcaa

SEQ ID NO: 423 - DNA, 32306 bp, Macaca mulatta
  source 1..32306: mol_type = genomic DNA
ctccggctcctgctctttgcagccgccgccgccgccgcagcctccccctcggcgctgggggaacttttctactctctgtgacggtctcccccaccgcccccgggggcaagtcccgctggtccgcccgccccgcccgcgaccgtgctcccagcccgagcctctgcgcctcgggaagtttattccgcccgccctcctccccttcctcctcctcttcaccccgcctccccgccctcccccggctctttcccccgggtggctgccgctgccgccgctgccgctgccagcctgctcctcggccagccgtgccggccccagggctgggaagcccccggccccacgcaccgctccgctgcagccgccgcagccgccgctgctctgggccggccctcggtccccggctgccggccccgcagagttccgggctccctcgccggctgcaccgccccgccccgccccgcgccgccccgcgccgcgccgacctgcagcgcccggctgccttgcactccgcctcccccggctcagcccccggccgcggcgggacccgaggtgagcgcaggtcgcctgccgcgcctgctggagccgggaggaccgagggaggaggtagcctagcgggagaagaggcagggatcgggggtggcagggtgggcgtctgcggtgcctccccctcgctttcattcctttctcccccaagcttgatccccactccgtgggggaagcagccgcggaacaaaactgtcttgctttgggcctgaactgctggtgggatatgggggggggggagggcagaggcgtggagcgggggtctcaggcttgcattggggtgtgtgtgcgtgcgtgtgtgcgtgtgtgtgtgtgttgtgaactccttcagggtgtgcgactctgacttttaaatcgatctggccgcggggccacggggctcaccttcctagcagagcttggtagagagtaaggagatagataggcgaatttcccccaccctcaaaatatccatctcttccaagaggaattttctgctggagagacagccaataaactctgctcaactccctccctccctcggttcttcctagctgcagtttcaaaaagcttcaaagccaggaatgtgggattcatcttccgatccccagaaggcaaatgtggttacagatgttgcacggtactttgccaagtttaaaacccttccttcaacactgtaaccaaaacagtgaggctagaacctcgggcgccctaagaagagatgtgggcctctggggccgctggattcagtaacttccgtcgggttctagactggctcggctctgtccagtttgtgccagatagtctcccaccccctccccacccctcctttcccctggagatttgaacgccgcttgcatggaagagaagctacttagagaagaaaacgttccacttagtaacataagaaaagtcttgattaaaaagttgtcatgaatttgacttttggggagaggcagcaaggtaacacaatggacttgtcaattttattgggcttttctttcttttttgagggatgtatgataagagttaggtgatgggcaaaggggccgttccatacgtgcttttacatatttttgaaaagaggcccatgaattgagacataacccagtggttttaaagaatcctgtcccagagatgcagattgctctgacagcccaagggaaggcggtggcaaaaaatagacaccacctcccttttccccaaaaaaattcttcctggaaaggtggtgttaagaaatttcagagatgggctgatccaagtggcgggccttaaatggaaacactatagtatgtcctggcacttgtctctggaggtgggttgctggccaggggcccaggcttgggcagccagcagacactagacttgtgctgacctcagacatcggcctctccatgcagctttatagtgtgcagactgcttaagtttggaatatgggcctcatccatttcactgatggggacataggggtcagaaggttatcttatgcctggatgggacttcgatcacttattttatgattcatttgtttttattttctgtcttggaattttaaaaaatgggattcttttgaagctgaaatgtaggccttaagttgatgtaactgggtgttggataatagcacttctactattaccccttatgcgggtactcacaggtggtgaatgatgtatagataaatttcggataagtgacaaagactaaggattgcgatgattatagattgggttcatgccctccctttccagctgtgttgttgagttttacttgaaatggagagggtgattttaaataaaacctgagttagatagtagtcttagaacttttgtaccttggaagagagtgatcatttgaatccaagcaagtttgttgttatctgtgaggaatttaaaggaatattaaggattcagagtaaagatgccatattcaggaatgtaatatattaatttcagaagtgaggaatttaatttgattaatagaattgtaatgaatttttttcaaagtagtgatttgccagattttctttatgtgtccaagaaaggtataacagagattgagtcaggatatagtggttatgcctctgtcttgccctagattgttctgaactagtcccgtgatggtcatggtaggcttctaggtaattctcaggcttggattgagtagtccagtcttctgagggagaggggcaggacagaaatggatctgaaaaatgatcctgctcttcaaggtcatgaggtgaagatggaatcagtgctgggactgggagctgtcatctgtggcttgttctgctcttggatccctgcatcttgatttatttttatgtgaagagatctcatgcccaactcagtaggaattctggagaagcaaaccactgatggtggcaaaactctttgatatgtttgggtggctttaatgacaggatagtttaggggtgctggatatgtgctaggcactgggctttacaggtgctttttcatgacatttccacaaataccatatgtcttattgttactttacctttctacaataagaaattgaagcttggcaaatttcggtggtagaatggggatttgaaccagaggtctgcaggacttcagaactcatgttcttggccacttttgccagtgattgtcaaacttcattcactcacatactatcttcctgagtttaccatggctgagtcctacttactctattaatattttcctttaaagcaacgattcacttaaagaaaagaacctaaagacatcattttttttaaagaggaaattgtgtattactaccgtatttggaaagccaactcacttgttaggaataggaggtagtcataaatatgcgtttgtacttgcactgaaatcccaacttcagaataaagattatgtggagtgtgcgtatggtgcagggacctggaataaaaatggaggaggtaggtagatgatacagtattggtgatgttctggtttttggattgggtgatgggttcataggtgatgattttatttttagactttataacctacatacacgatacatttttttgtaaaatgataaagaaaattaagcacataactattaacataatgattatttagggaatattttactgcactatgctgactatagatttagcttggtgccttgtatgcagtaggtacacaagaactattggctgattgacaagaccccaggaaataattgtaaagcaagctcattgtttgttatatttgaataaggttgaggtatatacccctcctcccctattttctcctgcttctactctcctttccagtattgcaactaaatagcgtgggctgcagtgaggtttcacctggctgtagttatgggagacacagcctgggctgaagctagcacttttcagcatcaccttgtcttatatatctagcacttgggatggggcaaagaatgctgtcgtgaagtgttaagacactttcctttttacccagtagtaaggtgtgaccattcagagctggaagcagtatttaagttaaagcagggcctggatgaaatgttagcaacattaaactggtgaggctgggaaataaagccatcagaaattttaattggaatctgcagaatctcctgttttattttcccaagcaagcactgggcactgtggctttattcctggaaatgaggatttggaattgggtttcctggtacaaaatgccttctttgatcttttggagtgaaaactttgtgtttctttctgtggccaattccagttctcagaagaaccaaatggaagatttacctcctcatttttagcagttggccatggagtgttcttgcttgccacgtctctactaaaaatacaaaaaactagccgggcgtggtggcgggcgcctgtagtcccagctactcggaggctgaggcaggagaatggcgtgaacctgggaggcggagcttgcagtgagccgagatcgcgccactgcactccagcctgggtgacacagcgcgagactccgtctcaaaaaaaaaaaaaaaaaaaaaatcagaagttctaaactaggatttgtctgttggaaggacattcaaatgaaagactgctttcgaaagagcctcatcaatttggtgtggttggcacatcacagcctttggttcagatgggaggtagttttgcttgaactcacactctcaaaattaactaataagagattcggcagcttccttttctgagttaacacacatacaccctctgcccctaatattcaaactgaccgcatatgcgaatactattcctgtgctcttctaggcagttctggaaatgtgagattgtttatatgtataaaggctcttatgtgatccgtcagctttgttttccagagccaatgctcttcagttgtttgatttttgggtttcactctctgaccaacattccactttgcccattagagttgcttcattgttgactctgggtatttggcctttatttctgtgactgggaaagtaactttaaatttcagtcttcctaaattttgtggaggcttgtgcagtaggtgaaggttgttttgaagaggggggatcccggtgagactacttttagcataagtgtcctgagggatcgcccaaggtcagttctcattcatcttgaggccaaaccctggctgttctggtctctccattgccccccactcccctcctttttgggggacccagattcttcaaggctcagagtaatcttactaagcaagactgctttctggatattgccgttttgcctttcgacagtctcctaggttttatcatccccatttcttattatgggacgtgattgatctctctgagggcaaagacttcaagttgttcattcctccattgattctttctgcacaagtcattgcccttcaccaatttaaaacctttcaaattatctccctgggctccttgaggcaagggactgttttattcatcttttgtgtaacttttgcacctaacacaatgcttggcctagaccacacggtcaataaatctttttgaattgccgagagaatgaagggatgattgcatattaagggagcaaagggacccagtcctctagggaatcagggaaatcggggacaagatgatactagtcactgtggtccgtaaggatgagtttggaaagtgggaacgaaagacattctatgtagaaggaactgcttttgatacctcttcatagtgcttaatgttataacctgtgcttagtcaattccacagacatttattgtgttcttttcagcatatgtttctttctttgtttttatatttaagggtgatgcttccatttttgggaagaatatctcactaattttttatatcctacagagcagggaatcctttattatttatagttaggacccaaacactcagtgaatcaattactttactcggactttttcctgttgcgtatgtttccaaacagttgacagtgaaaatatagtggtgggcaatgcttgtgtgagaggtggaagaatgtaggtgacctctttggaaaatggatggaatccaaagtaaactcctcttctgagagattttaagggctgaaatcagtggacataccacaagtaacttttcatcttcaatacttgatggctgtgtgtttttgcttatctatgaaagccaagattggctattaatatcaccatgccattgaaaagcaaggttgctctggtttgggggattcctttttagccagttatagaagaatattgataggccctccaaaaatataaccttgaactttagaaatgtacagaggggagaatgaaggtggggtgatcgtggacaaagttggacgttagaagtgggatgatacttgggagtttggaaagtgggtactgaggaaaatatgcagtaagaagaacttgagcattctggaatagaaaggatgagttgaggtgatgttttaaaccaagttccgaaacttccactattgcagctattgatgagtgttgactacacttggagtgaaagtaagatgtgcttgatttactctctgtaagtagtgagttaatgtgtataagcaaacatgaccataaaggctggagcttagggaggaatatcccttgtcctgatgtcagggacttacacaagatagaaatatacgtacgagtgaaagtgtaggtagttatctagagtgacaccttccttttcacgataagggacacatgtgcccaatgctatttttcatacagttttcatatgcttatcttgaacttgaagaacccgagttgttgtgaacaataagtggcaagaacaaatatcttatgaggatggcctagtaaaaaacaaaagctcggtcagcagagcttactttatataaacataaatgttctatttcagtatttttattttttttaattttttaaattatttttatttttatttttttttgagatggagtcttgctctgtcgcccaggctggagtgcagtggccggatctcagctcactgcaagctccgtctcccgggttcaggccattctcctgcctcagcctcccgagtagctgggactacaggcgcgcgccacctcgcccggctaattttttgtattttttagtagagacagggtttcaccgtgtcagccaggatggtctcgatctcctgacctcgtgatccgcccgtctaggcctcccaaagtgctgggattacaggcttgagccaccgcgcccggcctatttcagtatttttaaaacattttaacactcagcagtacattttatatcatgacctggtgcacacacaaacatacatgcatgtgcacgggtgttaaaaataaagccgaattacaagttctacaaaaaatattataatgctttttaattaatattcaatttttattttaaaaattctagtctttatatattaaactgattttacaacttgctaatgggtcctaataagcagtcagaaaaaaactattctaagtattgtggaaattagccttaatttgtttattgaatagttgctagtctggatgagacttttgtttttctttttgtgtggatttctgtcattttacagaaagttcatacccctatgctcctctcccttgctagattgttttttctgtgtaagggtctttacttgtttccaaatcagattaaagtgagtaatatgtgatttggaccagctccagtgtgcatcatcatcatcatcatcttgatccccatcagcatcaaaggtgggactgattcatttagaatggtggcaggagccacttaactccctgtttatttagattatacttgaagaggttgttgacgttcaagaataaggagaagccgaggttacacacacccaaaggatgagagggaggtagggaagatgacccccatatattgttcagaaataaaaaatgaaagcaaatcgttagtaggtacagctctttgcattcaaagacacaagagcttaattgttgtccttgtccttatcattaaaatcttgctttcctcctccttcatcttttcccctcttctttgtcctttatttattgagcatttatcaggtcttcctgtaggtgaggctgggcatagaaagcttagttaatatcaagttaatattaaggttcacttgagtaagggagtgaataattacacgtctgactattagtggcagaactctgaatatcttggtcacaagttacagagggataaggatcaaccaacacctttaaggaggtggctgtttggcctctgaaagaggtaccagttgggtgttattttgagaggtatctatacgtgtataggttgtagcataggcaacattccaaaaagagggaatgggacaagtaaatataagggggttgttttttatttagaggccaagttgtagaaaagatagttgcacatctttcttttttttgaatcggagtcttgcactgttgcctgggctggagtgcaatggcgcgatctcggctcactgcaacctccgcctcaggttcaagtgattcttctgccttagcctcctgagtagccaggattataggcacgtgccaccatgtccagcaatttttttttttttttcgtttttaggagagatagggtttcaccatgttggccaggctggtcttgaactcctgacctcgtgattcacccaccttggcctcccaaagtgctgggattacaggcgtgagccactgtgcctggcagttgcacatatttttaatcactggtctcagactctgtgtcctgggatgtagcttctcagggtaacatgcaagaccttagacaactgaaaggaacagcacgttcacagttaaaagtgctttgtgatgtggcttgattctatagagcacatcaagatgagcaccataggagcaagcttagaaagggagatttagaggcacattatggtttactttgaatgacaggctggaagttaagatatggcatgaaaacaggccttggtctagcctcttgcattatctcatttaatgctcactcatactccataaagtacctactcttttttttcttttcttttctttttttttttgaggcggagtctcgctttgtcacccaggctggagtgcagttgcgtgatctcggctcacggcaagctccacatcccaggttcacaccatcctcctgcctcagcctcccgagtagctgggactacaggtgcccgccaccatgcccggctaattttttatatttttactagagatggggtttcactatgttagccaggatggtcttgatctcctgaccttgttatccgcccacctcagcctcccaaagtgctgggattacaggcgtgagccaccgcgcccagctaaagtacctactcttatgcctattttatagagggagaaactgaggcctagagaggtgatataaatgtctaaggttacacatctgaactttaactcagactgtaaattcctacatcaccatcagtgtgcaccagagcagaggttgaaaactggtggtctctgagctcagtatacctcagagttctgtcctgtttgagactgtatttaagacatttttaaaaaaacatagttactaacatgtaaaaatgggggacattttcatttaaaaaaaaaatcaaaatgtccagctgctcctgcaacactgaaaactctggcagccccagggccgtattccttcctacaagaaactgccagatcttcttttgaccgtgtctgtctgagggagacgtgtgtgctgtggctgctactgtctcagttcatcctgttttctcccagacgctgaggttcggtgttagttgctatttattgttcttgcactgacaggtttgtttgtttgtttgtttgttttaaactcctcgcctacctggttcctgtaggccaactggattgaccctataggtgtatgagtttgaggccctggcacatagccttctgttagtcaaggatgattggtctagtggagtgggaagcccagaagccaggaggaaatgagaatagatggaactagggttttagccttgggctggagaagccatagggcttggtgaataaattacttttgcgatgagagggttgggcaaacatatgacttttggaacctggatgacggggagaatggtgttgctcttaaaagaaaatggaaggttgccaagaggacctggcttgggatggactgtggtgttgggtttgaggttctggtagagcgagaacccagaagaatgcttacatgagccctgtgagaagctgggactatggtactggaactctggagatgagggtttggggctttggctttgtattgactattgggtttgtactggtgattggtgagggatgagcatgccctgggggagagcttccttttggaaatgggaagaagtgggttgaggtctgaatgaaaaaatgaaccagctacaaacagttcaaagtctcatattgactttttggggtcaagtgccttatcttgcaaataaatcaactgtttatccgaatagaggagtaaaataacagtcttcaacttttgaacatgggaactggtaaaacctctgctcgtagaatcaaaggcagatacgctgtttgatgggtgacacctgtaacttatgtctgtgcctatttcactgagccttattaaggtaaaacgaattctaatagtgaccttttcttggtatcatagatgatacaaaatgtgaaaaagaagttgctggagccccaagatgggaaaaaaatgccagaggaaaatgctctgtgcttgagatttatccttgcttttaaccagtttagaatggaatgtccttttcaaattcagagaagcttttttttttttttctccttggcttgtttgcttaggattccctccaacttattgtttcttaatcagctatgtccacctcagctcctctgtcttctcctacttggttcccttttgatccctaaaggtcttattgttttaggacattctaagcacaagtagggtggatctgtctcagatgtgagtgttgtacatggaaatcttccaggagggcatttcttttgttctcttagagacttgtctccttttggggccatataactgtgacatttttagtttaattcaaattggtgtttttatttttcgttcctggttagctttattttattacatgtgcacagtaatatgagttcctatacattttttcctagaaataaaataattttattatgttgttttatttttgatactagtcatattatgacagtaatatgtgtgcacaatacaagatttgaagtacaggaagggtgtacagtaaaaccatttaattcagggactgtccatagatagagttcagtattacctgaggtttcaggtgttcactgggggtcttgaaacatatccccatgcctacaaaaatctatctatctatctatctatctatctatctatctatctatctatctttttcttttctttcttttttttttttgagatggattttccctcttttttttttttttttttttttgagacggagtctcgctgtgtcgcccaggctggagtgcagtggccggatctcagctcactgcaagctctgcctcctgggtttttacgccattctcctgcctcagcctcccgagtagccgggactacaggcgcccgccacctcgcctggctagtttttcttttgtattttttagtagagacggggtttcaccgtgttagccaggatggtctcgaactcctgacctcgtgatccgcccgtctcggcctcccaaagtgctgggattacaggcttgagccaccgcgcccggcgattttccctctttttgctcaggctgcagtgcaatggtgcgatcttggctcactgcaacctccacctcccgggttcaagcgattctcctgcctcagcctcccgagtagctgggattacaggcatccgccaccatgccaggctaattttgtatttttaagcagagacagggtttcttcatgttggccaggctggtctggaactcctgacctcaggtgatctgcccgccttggcctcccaaagtgctgggattacaggtgtgagccaccgcgccctgcctgcctgtctgtctgtctgtctgtctatctatctatctatctatctatctatctatctatcaatcaataatctatctcctgtgtttctggagataaataccaaggattggaattgctgaatcaagggatagttacattttaaatttcatggctgtgccatgaattgggtttttgctttgtatttgtgaagcaatgtggtgtggagatgaccctaagactcaaatgctcgtctgttctctggtgtaaaccaattgtgtggcccaagaaagtcgttttcttaacttttgtctttgtggtgctttcctttcctcatttgttaagaagggcacagacttaattatttctaaagtttagtaatttgttgattctctcagtctcactcttttttggtccttccaggaaatggagctttatgattttttttttttttttttttattcctgtgtaagtatgagtctgtaaagaactctgggctttggaagccttgctaaccacagctttactttgattgttttaaagcactatgtctggtgtgtgctttacattaaaagcagagcttatatggctgattacctttttttaaaaaaaaaaatatggtgagtggtaagtaggcagttagtgaccaggaaactcatatagtcagctttttattattgatcaagagtggaggcaatggatttttagacttaaggaaaaagttttatttttataatagctgtaaaaaaaaaagcagtagggctatgatagacagtttttaagaaacagcaacattttatttatgactttggaacagaccagaagaggtagcttttgatcttttgaattgatcttttggatttgatcttttgagcttttgatattttgtaatgtgaaggtaaaataggaatttttggaaattttgagatatttagccagtattgtgtaaaaagatgattggatttcctggtgattatcaagctagatctatttaaaaactgaaacccaagtaaacaaaatttcatgggaattcggccaagcgcggtatccaagtgcggtgacaatgggtcactcctgtaatcacagcacttcgggaggccatggcaagaggattccttgagtgcaggagtttgaggttaacctgggcaacgtagtaaggctgtgtctctacaaaattttttttaaaaaattagtaaggtgtggtggcatgtacctgtatacagtcccagctacccaggaagctgaggtgggagaattgcttgagcagggaggccaaggccgcagtgagccatgattgtgctattgtatcccatacagcctgggtgacaaagacccctgtctcaaaaaaaatttatataaatttatgtttatttctcatactgcattttttctttagaatttgctcctgtaaggctggacacggtggttcacgcctgtaatcccagcactttgggaggccgaggcaggcagatcacgaggtcaggaaaaaaaaaaaaaaaaagaatttgctcctacaacattaagcaatgtatttggattccaagttaaaagacttggaatttgggttgttaatataaatgcatttcttctggaaaacttttgagcccttagttactcattttaggaaaatcacttactaaatcaatctctctctgtctgtctctttttttttcttgagatggagtctcgttctgttgccaggctggagtgcagtggcatgatctcggcttactgcaacctccgtctcctgggttcaagcgattctcatgcctcagcctcctgagtagctgggataacaggcatgtgccaccacacccagctaatttttttatttttagtagagacagggttttgccatgttggccaggctggtctcaaactccttacgaccacaggtgatccaccagcctcggcctcccaaagtgctgggattacagacctgagctgctgtgccctgcctaaatctctttaagtatataaatgtattcaactaggtatagagtagcaaaaaaaaaaaaaaaaaaaaaaaaaaaaaagaaagaaagaaagaaagaaacaattatttaactgttctacaggccaggcatggtggctcacgcctgtaatcccaaccctttgggaggcagaggaggccagatcacctgaggtcaggaattcaagaccaacctggccatcatggtgaaaccttgtcactactaaaaataaaaaaattagccaggcgtggtggcacacgcctgtaatcccagctactcgggaggctgaggcaggagaatctcttgaacctgggaaacggaggttgcggtgagctgagatcatgccaccgcattccagcctgggcgacagagtaaggctctgtctgaaaaaaaaaaaaaaggtaaatgttctacagcagaggttaggtttacatatattcacagaatagaattttatgtaatcactaaaaacactatttttgatgaattttcagagacagatctcattttaaaggtagttaccttttcaaagaggcttttgttggctattccatctagtttgagccttaattattttccgtatcttacatatactaccttatatatattatcagtaaatacaaggtatgtctattttgtactgtgtgtgtgtgtgtgtgtttattctgtgcctactataccgtcttatgcataggaggcacacataacttgttgcaatgaatgaatgaccgtagagagtacccataatattgtagagagtacacataatattacgtgaaaaaagcaggacactaaaaacatagtataattcctttcatataaattatgtacagttccgtagtacagttccgtaaacataaacataaaacgtagtacactttcagatttgtagttaacatatatatatggatgtagagaaaaaaagatggtaggaaataatcctaaattttagctgttacctctgtgctgtgggtcatgcataattttgaagagacaacctttaaatacaaatgggtgaagtaaatattgaagattatgtcaccctgataatgtattttaccctttccacattaaaggtggtcaccttacctaaaatgatatattgcaataccgtggccttttctcttcttgagtaaaatgtactgtatctctgtagtgtgacaggttttatatctacttgaggattaaattatgatctaagagttgcacttttaagaaactggctttaatttcacatcagttgaagttaaagggtggtgaaagtatattagatctgctacaagtgtgtaattataattattgacacattttcaactcttaagtgtgatgcattgcccatgattttgacagctgtgactacattaaacctgctggaatactcttttcacaaagatttgtttaaacttagaattgtcagaaggattctccataaagtggatgaacacagatttagaggtgaaatggtggttcatttcccactgtgcctgttgatttttcgtctgttaaatgttaaacagaagattacctggatttagttttcatgtcaagaaacctgggaattttattttatttttatatagtataaaaaatgtgtgctgctattcctttgtgataggactctatgcagtgatagcgtagaatctcattctgtctccttctgaaggtccccaaccacataactccaaactgacagacttgatgttgcataacatccttattttctgaacgtctccttcaagaaagttcacatattatctccttttcatggccattctatccttctatatagatttattaagtcgctactgtgtgccaggcactgagaatatagacagaaaggctgtcagagagctcagcttggcagaggcagaaaaagaaatagccaacgtacagtagagtgaagcgccacattagagctctaaacgtaaaattgagatgtacaattctgtttgagggtactggaggtcatctcagggaacggatgttcttgagtatcttcaaggttaagtaggatgttatcaggtggggaaagggccttctaggcacagaggctttcagtagagacagcaacctttaaaactgaatatggctagaaccttgctactcagcaagtggtccttgggtcggcagtgatggcatcaatagaaataaagagtctcaggcttgcctgaaatcctgctggatcagaatcagctttgcaacagtatcccccagtgatctgaatgcttccaaaagtttgagaaacattggacttgagcataggaaggggtaaaagatgggagagcttggaaagtagaccacctgcaaaggagattggatttttttttttcctagcaaaaagttgataatggagaagtgacattatcagatttatattttctaaagattgtctggaagtacatgtagagcagcatctgccaagaatgtttcttgaaaccttaattgtatataaggtgcttcaccaaaaaaggtcctcaaataagtttgaaaaatgcaggatattatattcttctctcagacaatataaagtatcatagtaaattgaaagttttgagaaattaactttgaagaaaaccattcacttaaccacttatcctggaatatccctagggtgttccacatttattccacagtggaactctttgtagcctcgcagctgttaataccctagggatggtggataacattctgctgaactcattttggaaactgctagcgctgcttcctaaacctcagacacttagccttatctgagtagggtaactgactgtccgcgtttagcggagatcctgggatgctagactttcgctgctaaactgggcaaactggggtggagttgggtacccttcctagcagtttaccacatatattactatttactttattttctttaggtaggctcagccttctttccttcaattcctgttttagtctcattttcatggactggtcccccaacttgtctgcattggaagcacctggggagtttccagacctgagcctgtgcccacctcgtgaggttgtgatttaattggtctggggtatgcattggcccttgggatatgagggagacttttcaaaaagtcctcaggttattcaaacgtcatgaaagtttgtccaaagccattatgcctgtggaaacgtagtcttgaaatgctacttaagaatttattttaatatataatacaaaaaatgaccattaaaaacaaaaaaaaaatagttgaagaatcacctagcagcatgtgaggcaaccaccagttgtacctgttccacactttgggaaacgcttaggggaataatcgaaatgtgggcaaaaattagggggctggagcttatttggtgagtggtgtggctggaaacgatattgcagatttcagggctgtttgggagtctgagcccatgagatgtggtgactgatgtggtctgtaaggtggaatagagtaggaaaaggagaatctgataactgcaggcaacctgggggtacatgatgatcatgttactggaaaggggtcccaatccagaccccaagagagggttcttggactcacgcaagaaagaattggaggcgagtctataaagtgaagtctagtttattaagaaagtaaaggaagaatggcccttccgtaggcatagccccccaagggctgctggttgcccatttttatggttatttctgaattatttgtgaaacaaggggtggattattcttgtctgcccttttaagaccatatagggtaacttcctgacattgccgtggcatttgtaaactgtcattgtgctggtgggagcatagcagtgaggatgaccagaggtcactctcattgccgtcttggttttggtgggttttggctgggttctttactgcaaccggttttatcagtgaggtctttatgacctgcatcttgggccgacctgctctttcatcctgtgacttagaatgcctgtctgggaatgcagcccagtaggtctcaggcttattttactcagcccctattcaagatggagttgctctgattcaaatgcctctgacaatcacataacagatcaggaaggtgtggggaatgcagcaaggtgacaggctctatttgagaggacttgggatgtccaagtagagctgtctggtgggttgtcagaagaaaaacagacggggcatgctggcttatgcttgtaattctagcacttttggaggctgaggcaggaggattgctttaggtcaggagtaggaaaccagcctgggcaacatagcaagaccctatctctatttaaagaattaaaaataggccaggtgcagtggctcaggcctgtaatcccagcactttgggaggctgaggctgggggatcacctgaggtcaggagttcaagaccagcctggccaacatggtgaaaccccgtctcgacaaaaattagcagggcataatggttatgtaatccataaccaatagtaatcccagctaccctggatgctgaggcaggagaatctcttgaacccgcaagatggaggttgcagtgagccgaggtcgcgccactgcactccagcttgggtgacagagcgagactgtgtctcaaaaaataaaaataaaattaaaaagaagaaaaacaattaatatttaatagcttagagaggagagggctagatagagatgagagcctctacttcttggtacaggaggcagtaaagttcaaatggggatcagaaggtccctgagaaaggggagagggtggatctgtccccttggtccaagggatgagttcttggagaaggacgttgagagaagagtctgggaacagcctgagaggtaggaggaacacaaaagagaggctcctatcatcatagagaggaagggaaggctcctcccaggtagccctgagaacccagtaagagaagagctcaggagcgtgttttgttggaagttagtcatcattagtagtgtttgtaagtttagcataaagaaggaaaccaacttttcgtgggttgagagggaggagaccactagatcaagtgactttttttttttttttaagtttttactgaagaaaaagcctggcatagtgtgggaccttagggaataagtatgggtttctttggggagtagtcatcttctggttactcatgaagttatgtcaacaaggaagaaaaaattacaagaaacattcacatattcacagaaaaagtgccagacttacctggggccccataaaatccgtttattttcaaatcataacctctcatcttttctccccatcttccctaaagtttgctctgttattctctagactcaacaatctcaatttctgaattgatattcttgtaaatgtcattaggatttcttacggtgctgataaggctgcttgtgattaagtgttcaacctttgtctatatgtggtgcacatttctggaaggctttgtagtttaccaaagcaacactgcattttacatgatcctcttaataaccttgtacaggaggcagggcagaaaatgatattattttattttacagggagaaaaaagcctttgaggtttaaatatattaaggagaacctgctaatgatgaatgatttagtgatggatccagggtgcaattctggtctctctggtacagtatttcttccttatggtggaggaggatgggggaagggtatcttctttttttttttttccaattagtttataatttccttgaggatggggaccatgtgttcattgttgagactgtgggtgttggggatgggtaggagagccctttggtccaagctttaccacacacaaggacttcacattgtcttgatattacctttgtatcacagaatcccataaatatccagaattgtgtattttctttttctttcttttttttctttgagtcagggtcttaccctgtcacccaggctggattgcagtggcacaatcatggctcactgcagcctcaacctcctgggctcaggtgatcctcccacttcagcctcctgaatagctgagactatagtgcgtaccaccacacctggctaatttttgtattttttttgtagaagcggggtttcaccgtgttgcccaggctggtcttgaactcctgggcttaagcaatccgcctgcctcagcctcccaaaatgctgggattacaggcataaaccactgtgcctggcccaggattctgtattttcaacaggattgaaagaaggtagcatggatcctataactttgaacttgcatctcagtattggaccatgtaattatcttgagaccagcccgatagtattgcttggcctgttttgtaaatatttaaaacatacacagtttttgtcatcctgtttttacatttaaaaaacattttttgataccagaaatcatctatagtggaagtggcccaaacctctcgacttcaaagggacccttctctgtatgtgcatggaaggacctgaaaatgaaccagcccctgtaacaaagctcaagtccagtaaagatgatgttttgtaaccaccatagggctcaccacagacacttaataaatacttgttagtttgaattgagggaggtgttgttttgtgttaaacattctccacatttatcacaatggaccactgacaatttttaattttttgtaatgatctttcccatgagtcattaaagatacggcactaggatttggggaaggggaatgatgaaagagaatacagaaatggaattggcaagttttaggacaagagatgagaagttttgagtgagtgaatagttgaaagcgggaaggcattgctcaggggaaactggaaataggtggaggcacttttaagacggcagaccacgggtatatgaggatgagacaggagtaatgcagagctgatatcttaagggggaaactgaaggctttttttcaactttaattatagccacaggataaaagcacattatagcactttttttctacctctactaagggctaggaggatataatctgtctcgtagagtcttgtcaaagaatctgcacttcagactacattgaaatgtatttctttttaagtttttggggtgtcgcaggttgaggaagaggaataaacatttgattccttgtgtttacattaaaatttcaagctactatttcatgatgaagcgaggaactttttagtcattgaagagatttaggcggatgagttaatgtttggtcatcagaaaatgtagcatgaggagcatgtttctcttgggaggagaaaaaagcaaaatatgagtcagacaaaaacatcaagtcatttcccgccactcgatgcagccacccttttgctgaaggaccatcgaccctgcaagtctaattcagacagtgatgaccactggcatttgaagcagacttcacagtttataaagctcttccccctgaaggccactcacagtgttgctgactctttgtataacattggcacttctgatgaggcgggcacaagtgagttattcttctggggaaggtgctttgatttaaaacctaaaaatgccatctgtaatctgaatgggacagagttttcctttgtgagggcccatcagttattcattgacaatgacatggactgtcacccagtctggagtgcagtggcgcgatcttggctcacaacttccactttctgggctaaagtgatcctcccatgtcagcctcctgaatagctgggaccacaggtgcaagccaccacatccggctaatttttttttgtgtgtgtgtatatatatatatatacactttttttttttttcttttttagagactaggtttcatcatgttgcccaggctggtctcaaactcctaagctcaaaaacgtctgtcctccttggtctcccaaagagctgagattacaggtgtgagccaccatgcctggccagttcgttggcatttctgaaaaacgctaaaaggcagtaaactagcctgtaacattgggagagtgtgaggtttgtcttagatacttattttatttttgagatggagtcttgctctgttgccaggctggagtgcagtggcgtgatcttggctcactgcaacctccgcctcctgggttcaagcggttctcctgcctcagcctcctgagtagttgggactacaggcatgcaccaccatgcccaactaatttttgtatttttagtggagatggggttttaccatgttgaccagaatggtctccattttctgaccttgtgatccacccacctgggcctcccaaagtgctgggattacagatgtgagccactgcacccagcctgaaaaagatacacatttttttcattttggatttgccaatatgatggcagaacactgtcattgtcttcctgtgtctctgttcttgatctttcagtgatttttttatgttgtgttccattttgctgggtatcaaattatcaccaagtctttgtgcaaatccagagaggtaactaactagaaatatgtgtgtggaagataggtatgaaatgttaggaaaaagaaaatgcttcttcctaactttttttttttttttaaactcctttggggtctgattgattcatgcttttttatttgttgaaattttttgaatactaactatgtgctaggctctgtgttgattatgtgttggtgacactgagaccaaaggtgctattcctagcttcaagagaattcatggcttagtaaaaggaacacgtaaatcagtggttacagtacagcttggcaaatgcgggtgtgcacaatgtacagcagtgacccagagggggaaacctcacccgcgttggggagaaggatgtagggaagcttctgatcctagaaggtattacgtgagaagaataagtagaagttagcctggtaatgtagaggaagggcattttagcgtagggaaacttcattgtaaagatagaaggcataagaagagcatagtacaagctgggaatgcaggtgttttagttgaactgcagcttagggtgcctgtgggaattgatgtgacataaggctggagaggtgggtaatggctatgtcatgaagactacttattgcttcctaaacaattcaggtcttatcctgaaatatgctagctaggattttaggcaggaaaaggatctgattagatttggattttggaacagttatgagcagcagctataagaatattctttttcaatggtgtctattcatctatgctttagactgaattgtgtccttcccagttcatgtgctaaagcccttaccctcagtgtgctcctatttggagatgaggtctttgggaggtgattagctttaggtgaggtcatgaaggcgggaccttcctgatgggattagtgagcttgtaagaagagataccagagaacttgctgtctctttcctacacgagaacacagcaagaaggctgcccctctgttagccaggaagagggccctcactagaacctgaccatggcatcctgatcttggacttctagcctctagaactgtgggaaagtaaatttctgtttaagccatccgatctgtgatgttttattatggcagcctgagtagactaatacaatctatttattatttgggtaattgtgaaactaggaacaggaagaatattatagtaattcaagtaagtagcaataatttggctactgtcttttgttttaaaaatatttgggcatggaacaaatcattataactgaacttctagttttgagatcttatggttaggatattactagctataataagttttatgagagaaccttctcccttgaacatctccacatcctaccttctattaaagtaatccactgattcccttcactatagaggctttgggtcttttcattgtcttccggtcagcaggttggtacagctgaactctcagtacctagtgcctgagtgttgaatctgttagccctctgctttatctaattttgatactatgacatttatagtgttttaaaggaatcttctgtatatggttttaggagttctgtgggaattaataccatttagaggatcatgtaactatggcagatgatgtttgtgatgaaattggtacctatcttgtgtatgtttgaataactatttaaaagagaatatttttcatagttttgtttttatgtctgaagatctgtcttaaacattttatcccgtacttaacttgtatccgatatttgagtctagtttccctttcttttcccaaggtcttgctctttttttttttttgagacaggctctcgctctatcatccaggctgtagtacagtggcatgacctctgtttactgcagtctccacctccctagttcaagcaattctcccatctcagcctccctgtaaccgggaccacagccatgtaccaccacgcccagctaatttttgtatttcttatagagatggggttttgccatgttgcccaggctggtctggaatttctgagctcacgcgatccacccgccttggcctcccaaagtgctgggattacaggtatgagccactgtacctggcctattctttattttttaaactctgtcctttctccccaattctctctaatttgtcctctttattggccttttctcttgagtttagaaataggcttacgtattctgttctttaaaaaaaaaaggtgttttgacgcctatacctctcataagccccttcctgaggaagcattttagaaaacgaatccacattcaatgctattgcctcttcagcctgtagtcttcttcagaacataataatcttacgttgctcccattcattcaatgttttggaagtgcctaccaaacgccagaactggggtgtgtgtgtgtatctttgtttccctcccaggaggcctctttttagtggtagggtcacaagattgggaggagttatttagcccatctctccagtgcctgcatttgctctgcattataccctctgagtgaatcctcagccttcactgaaattctacaaagttaggggatgcagtatttactaggagcccactctgcctttggactaatctgactgccagagggttttttgatctataatgaattttgcttctatttatcctttgatcacagttcttttcagctatacagaatatagagtataatagtatttttacatgatttgagctgtcatatttacccccaatatcttttttctaagaatgtcttcatagcttccatgggtcttcaccatcctgcctgccttgttgcttatacttctgtttgattgagtctttaagaattggtgtctagaactgattgtaatattcctgactgggttttctctcctctgattttttgacttccatgcttgtattatgcagcccaagctgctatatttcagatggccacatggttctacttggagagttgatcaccaacggaaatctcagtttttttccatagatgatactgctaggtcctgtcttcctcagcctctccttgtcgcttatacccttgtcttttattccctttactgcgtgtgggatcttaaatttaccttaagttaactttcagtttgctaggtcctgcccatagcagtttgcattggattccatttctgttattttagggaagatgtgagtttttctgaaatagtaccctttgaatgtagtaacttaacagatctatctgatctgttaagatagatctgttaagttaagatggatctgttaagttaacagatctactaagttaacttttctttttatttttggagacacagtcttactctgttgcccaggctggagtgcagtggtacgatctcgactcactacaacctccgcctcccaggttccagcaattctcgtgtttcagcctcctgagtagctgggattacagacatgcaccaccacagccagctaacttttgtatttttagtagagacggggtttcaccatgttggccaggctggtctcaaacccttgacctcaagtgatctgcctgccttggcctcccaaagtgctaggattacaggtgtgagccaccgcccgtggccaagtaaactttttctttttctttatcttttaactttttacttatcttgatcacaaatatttcataagacatgttgtcaagtctagatgtgtatgttcccttgaactgccagcttaggaatcttaacgagaaaaggaaactgggttaatcttgtatgatttgttcttactattagggttcgcagggattactactttctaagtgtttaaaatccattctcaagtattgcctgggacttgttctgagtgtctgtagtctgttggcatttttccctctttttttttgagaccaagtcttgttctatcgcccgggctggagtatagtggcatgatctcagctcactgcaacctccacctcccaggtttgaatgattctcctgcctcagcctcccgagtagttgggactacaggtgtgccccaccacacctagctaagttttgtatttttaatagagatagggttttgccatattggccaggctagtcttgaactccagacctcaagtgatccgcctacctcggcctcctaaagtgctgggattgcaggcatgagccaccacacccggccttctcattttaatttttctaaagtgtcttctgaagcatcttgttcctttctgacttcattctttgctgacctcttttccccaagttttggaattctctgagattgcttttcctctctctttcaatctgtgtcttttaagattctctatgcttgcattgtccagtaaggtagctactagccacagtcaacatagaaatgttactggctttaaagaatctactgatttcaagttgaaagccagaacaggaaacgctgacacctgggtagaaggttaaggttgactattccaggaatcgagagaggagcacgaaagtggccacagtttaactagttatacttgcatgttggctgttgccaggttatctgtataggttcctgacccctgtctcctgctaacaataagtcattattgcaaataaagtaaatattaataaatatatgtgtagagtatttttaataaaagcctatgtgtagtgtgccaaaagataatgagctttggaaacaaagtaagttcttaaattggcagtttctacacctgattctgtatagtactgctaaacttgctaggttattcaaatactatataataatgtttgtaggcatttcctagtgtttggatattttctgtaagctacacttttgatatatactactgtacttcacattttttattaagcaatttaaaaagatgtttataatagtgaataaacagtattggaagtatttgaaaaataatttatgatttcagaaattacagttttttcccccaaattttgaatattgatattgatagagagtttgaaacaatagtacatagtgcttgtccaaagaactatttatttcttttgataatatgataggtacagaaattgagatagtgtttagagattgttatggtaatttgatattgccatcagtacttgtgatcagtggattcaacccaccgaacaaggagttttacaaaagtattggtccattacagatggtaattttgttgtataagtactggtctaggtgagaggtagtgatttcttgaaccagacttggaagtatgagaagagattggttggaatcaggatatactttgaagatagagccagtgggatttgctactagattagatgacagattattctagattatctttccctctaaactgcttcaatttataaaatgggtgtagttatgacagcaacactcatttttgttgtagctgtgtcagatgtttctttgagcttgctggaaatcccttatgttcattactgctaatatcatctttctaatccaatcatgtaattcccttgaccttcaaccatcaactgctcaccattatagataaaaaaaaatattaaactgcttaggttgacttttaagatatgaggtgcatcttctttcagactgttttccatatcctctgttgctcctgacaatagcccaactagactgcctgctggtccagtcaatctctttctgcataataaactacctcaaacttgatggcataaaacgacaaccattttattgtgctcacagtttagtgagtcagggatttggaacatgcacagcaaggacagcttgtctctgttccacaatgtctggggcctcagctgggaattcttgaaggttgggggctggaatcatccaaaggctcattcactcgcatgtctggcggttgatgctggctgttggctgggagctcagctggggctgtcagctgaaacacctacatgtggtctctctgcatgggctattttgagcttcctcagagcatggcggctgggttccaagagcaagtgtctcaaaagacaggaagtggaagcttccagtttcttaagatctggttctggaagctgttacagtgtcacttccaccatattctgttggtcaagctgtcacagagccccattaaagaggaggagatacagatcccacctcttgatgggaagagagccaaagaatttgagggccatttaaaaaaaatcaaatggggtggtggggggggtattttaaaatggccacatcctactattcaccagtcttctctgtctttctgagtctctgtcagctgctccctgtctccactcctcaccccctccccagttcaaactccatctctttctccatgcagtctttgtcatgtctcatcctctggctaaaatcagtttttctctcttctgtgttcccatagcattactgtttgtaattcttctgtggtaatttttcagtgtttttctttcttggtagattataaactctttgaaggtaagaaccatgtcttgcttacctttgcatatctcatagcaggtaagttttttgaatggaactttcaatatcaaactgagtctcacatctgacacccagatgggttgggacttaacagtggttaaacagaaaatataatgagaaaatttaaaacattccttaaaaacatcgtttctgatgttgtattttaagacttttgaaatgaactctctgttgtgagtaaaacttctaatttttttctcctttggccataaaattaaaagagattaactttttttctgatattatcaacatcttcctgctcaggtcaatctctgataggcatgccctagtgtttttttggtgaactttagatctcagtccattactggatcagtttagggagtcacacccaagactagaaatgaaaggaaattgaagttttgaataaagcttatgaattgcaagggtaagaattgttttatgaaatttttgtttcagttttatatgcatgtgtataataagttcaaatataaaataagtattaaaaatctttgaaagatactctcttatgcagcctcattctaaactgttgatgtcctggttcatttctttggctttttcttttttagcttatttcttctggtgtcctttctgagggcttatatatgtacatattgattctggggaccatacacacatgttctattaatctttacctatctagcctctttttataataaacctcagtttcccagaatgacatatgttgctttttctcttctcctttggagactttacacctactctcctgccctcaagaggccaggaggtggaattagcttattattttcttttttcttttatgtttttattgaagtatagaatccatacagtgaagtgtacaaatctacagtgtacaactcaataaatttttgcatctgtatttacccctataagtatcactgcagatgaagatgtggaaacagtttcatcaatccagaaggggtcagtttattcttaaattatttctggaacaaggtggtggtgtggtggtgtgagtaaattagtagattctctctgatttcttcatatggcatatgtaggttataatgtttagtttagaagatcgcaaaggtctgaagcaactgagttagaaagtgttaaaacagggaaatgggatgttgaatgtgagctttggcagaattaaatgggacgagcttgagtgaaacaaggggaaaagcaaagaggagtcatatcacgaagaattcaggagaagcaaggtttatttgaatttcagaagggaaaacataaaacttagtttgccattgctgctgtaacaaatcatgacaaatttagtatcttgaaacagcacaaatttactttcttccagttttggaggctctcgggagaatccacttcctttggcttgtggctcttcctccatcttcaaagcaccttctttccgtctctgtttccatcgtcacactgccttctcctctctgaagttaaatctccatgtctgtttcttaaaaggacacttgtgattatatttagggcctacctggataatccaggataatcgcctcatctcaaaactcttaatttaatcacatctgcaaagtccctttgtcacataaggtaacattcacaggttctggggattagggcatggatacttggttttggttttcaaggatctttattcataaagggaaggtctgctatatatttcctgctagttcattctcctttttaatgctagattaatttttctaaaacagcaccttgtacattttacttctttgctcaaacatctttggtgacttcccattggctgatacaattattagggcctagattgacattcacgtggctctttaaccccaagtcacatttcaggtttttctcctcctctttcatcatggatgcagcagcatgcattttctcattgttgcccccatgattggcttgtctttgcttgctgtgactcttcctcctgcctgtggggcccttaccctcccttcaaggccttctcagcagcattcccctaaccatctgtattagcttcctagggctgccgtaagaaattaccacaaacaacagcaatgtatcttgcaaagctgtggaggcccgaggtctgaaatcagggtgccggtagagccatgctctaactgatggctttagaggagactctttcctagctcctttcagcttctggtatctccaggtgtttcctggcttgtggcagcatgactgcaatgtgtggctccatcttcacatgaccttctctctgtgcctctccatgcgtctgtcataaagatgcttgtcatcaaatttaagtaccacctacagaatccaggatgatctcatctcaagattcttaagttttttacatttgtaaagacccgtttcccaaataaggtcacactcacaggttccaaggttagaacgcagacaaattgtttggcaggatactgttcaacccactacactacctcagtcggcagtcataacttatttctgtgacctcttgacatgactggcatgcctacacaacttattgggaacccatcatctctatcttactatttttggataattctcacctctttcactaaaccataagtccttgtcttagtccatttgtgctgctataactaaatcccttagtctgggtaatttataaataatagacacttattgcttacagttctgaaggctccaagatcaaggcgtgggcaggatttggtgtctggtgagggctcactctgcttcaaagatggcactttcttgctgtgttctcatatggtggaaggggggcccagggagctctattttttataaaagcacgaatctccctaaagacttaatcacccaccaaaggctccctgcctcttaatagtatctcattgggtattaggttccaatgtatgaattcttgcgggggcaccaaccttcagaccacagcagcccttgaggtcaaaagggtttcttttgctctgaaaccctcagttcctagcagggtgcttagctctgtagtgcttcagaagcagcatctatcagatgatcaactgttttttttcctttttttaataaaatgaaaggtgtcaagtaaaaatcctggtgtgattatcagaattttattttgaaatatcacaggtgatttttctcattgcaagtttcttttttgtttgtttgttaatttctggtactttacttttggtgtagagtaactgcttttgattgtctggaaccttaagtgagtagggagcagagctgctgttggagtagccaaagctgagaaaggcctctgcggggaagtgcaaacccagtggggacagggtgggtttggagatcggccagatacagcttggaaggcttgggggccgagctgtcactgttacttgggaatttgtcttacctgggtgggctcttggaagtcttgatcctcactggaatcctttccagtgggttctacaaacctggaagacactcttgtgagcacttgaacttgatctcccacagcacaattggagggccatgccgagggcggcccccagccttgttttccataaggagatgatggtttcacaatgtc

SEQ ID NO: 424 - DNA, 32306 bp, Pan troglodytes
  source 1..32306: mol_type = genomic DNA
ccccgcgccgcgccgacctgcagcgcccggctgcctcgcactccgcctcccccggctcagcccccggccgcggcgggacccgaggtgagcgcaggtcgccggccgcgcctgctggagccgggaggactgaaggaggaggtagtctagcgggagaagaggcagggatcgggggtggcagggtgggcgtctgcggtgcctccccctcgctttcattcctttctcccccaagcttgatcccctctccgtgggggaagcagccgcggaacaaaactgtcttgctttgggcctgaactgctggtgggatatggggggtgggggggcagaggcgtggagcgggggtctcaggtttgtattggggtgtgtgtgcgtgcgtgtgtgtgtgtgtgtgttgtgaactccttcagggtgtgcgactctgacttgtaaatcgatctggccgcggggccacggggctcaccttcctagctgagcttgtagagagtaaggagatagataggcgaatttcccccaccctcaaaatatccatctcttccaagaggaattttctgctggagagacagccaataaactctgctcaactccctccctccctcggttcttcctagctgcagtttcaaaaagcttcaaagccaggaatgtgggattcatcttccgatccccagaaggcaaatgtggttacagatgttgcacggtactttgccaagtttaaaacccttccttcaactgtaaccaaaacagtgaggctagaacctcgggcgcactaagaagagatgtgggcctctggggccgctggattcaataacttccgtcgggttctagactggctcggctctgtccagtttgtgccagatagtctcccaccccctccccacccctcctttcccctggagatttgaacgctgcttgcatgggagaaaagctacttagagaagaaaacgttccacttagtaacagaagaaaagtcttggttaaaaagttgtcatgaatttggcttttggggagaggcagcaaggtaatacaatggacttgtcaattttattgggcttttctttattttttgagggatgtatgataagagttagatgatgggcaaaggggcccgttccatacatgtttttacatatttttgagaagaggcccatgaattgagacataacccagtggttttaaagaatcctgtcccagagatgcagattgctctgacagcccaagggaaggcggtggcaaaaaatagacaccacctcccttttccccaaaaaaattcttcctggaaaggtggtgttaagaaatttcagagatgggctgatccaagtggcgggccttaaatggaaacactatagtatgtcctggcacttgtctctggaggtgggttgctggccaggggcccaggcttgggcagccagcagacactagacttgtgctgacctcagacatcggcctcgccatgcagcttcatagtgtgcagactgcttaagtttgaaatatgggcctcatccatttcactgatggggacataggggtcaggaggttatcttatgcctggatgggacctcgatcacttattttatgattcacttgtttttattttctgtcttggaattttaaaaaatggaattcttttgaagctgaaatctaggccttaagttgatgtaactgggtgttggataatagcatttctgctattaccccttatgcaggtactcacaggtggtgaatgatggatagataaattctggataggtgacaaaaactaaggattgggatgattatagattgggttcatgccctccttttccagctgtgttgttgagttttacttgaaatggagagggtggttttaaataaaacttgatttagatagtagtcttacaacttttgtaccttggaagagagtgatcatttgaatcctagcaagtttgttgttatctgtgaggaatttaaaggaatattaaggattcagagtaaagatgccatattcaggaatgtaatgtattaatttcagaagtgaggaacttaatttgattaatagatttgtaatgaatttttttcaaagtagtgatttgccaggttttcatcatgtgtccaaggaaggtataacagagattgagtcaggagatagaggttatgcctctatcttgccctagattggactgaactagtcccatgatggtcatgataggcttctaggtaattctcaggcttggattgagtagtccagtcttctgagggaggggggacaggacagaaatggatttgaaaaatgatcctgctcttcaaggtcatgaggtgaagatggaatcaatgctgggactgggagctgtagtctgtggcttgttctgctcttggatctctgcatcttgatttatttttatgtgaagcgatctcatgcccaactcagtaggaattctggagaagcaaaccactgatggtggcaaaactctttgatatgtttgggtggctttaatgacaggatagtttaggggtgctggatatgtgctaggcactgggctcagctcttcacaggtactttttcatgacatttccacaaacaccatatgtcttattattattttaccttcctacaataagaaattgaggcttggcagatttcagtggtagaatggggatttgaaccagaggtctgcaggacttcagaactcatgttcttggccacttttgcagtgattgtcaaagttcattcactcacatactgtcttcctgagtttaccatggctgagtcccacttactctattaatatttttctttaaagcaatgattcacttaaagaaaagaacctaaagacatcattttttaaagaggaaattatgtattactaccatatttggaaagccaactcacttgttaggaataggaggtagtcataaataggcgtttgtatttgcaccgaaaccccaacttcagaataatgattatgtggagtgtgtgtatgttgcagggacttggaataaaaatagaggaagtaggtagatgatacagtgttggtgatgttctggtttttggattgggtgatgggttcataggtgctgattttatttttagactttataacctacatacacaatacattttttgtaaaatgataaagaaaattaaacacataaccattaacataatgattacttagggaatattttactgcactatgctgactatagatttagtttggtaccttgtttgcagtgggcacacagtaactattggctgatcgataagaccccaggaaataattgtaaagcaagctcattgtttgttatatttgaataaggttgaggtatgttcccctcctcccctattttctcctgcttctactctcctttccaatattgcaactaaatagtgtgggctgcagtgaggtttcacctggctgtagttatgggagacacaggctgggctgaagctagcacttttcagcatcaccttgtcttatatatctagcacttgggatggggcaaagaatactgtcatgaagtgttaagacaccttcctttttacccagtattaaggtgtgaccattcagagctggaagcagtatttaagttaaagcagggcctggatgaaatgttaacaacattaaactggtgaggctgggaaataaagccatcagaaattttaattggaatccgcagaatctcctgttttattttcccaagtaagcactgggcactgtggctttattcctggaaatgaggatttggaattgggtttcctggtacaaaatgccttctttgatcttttggagtgaaaactttgtgtttctttctgtggccaattccagctctcagaagaaccaaatggaagatttacctcctcatttttagcagttggccatagaatgctcttgcttgccatgttaagtttaagaatcagaagttctaaactagggtttgtctgttggaaggacattcaaatgaaagactccttttgaaagagcctcatcagtttggtgtggttggcacatcacagcctttggttcagatggcaggtagttttgcttgaactcacactctcaaaattaactaataagatattcggcagcttccttttctgagttaacacaagtacaccctctgcccctaatattcaaactgaccacacattcgaatactattcctgtgcgcttctaggcagttctggaaatgtgagattgtttatatgtataaaggctcttatgtgatccatcagagctttgctttccagagccactgctattcagttgtttgatttttgggtttcactctctgaccaacattccactttgcccattagagttgcttcattgttgactctgggtatttggcctttatttctgtgactgggaaataactttaaatttcagtcttcctaaattttgtggaggtttgtgcagtaggtgaaggttgttttgaggagggggatggggtgagaccacttttagcataagtgtcctgagggatcgcccaaggtcagttctcattcatcttgaggccaaaccctggctgttctggtctctgcattgcccctcactcccctcctttttgggggacccagattcttcaaggctcagagtaatcttactgcaagcaagaatgctttctggattttgccattttgcctttcgacagtctcctaggttttatcatccccatttcttattctgggatgtgattgatctctttgagggcaaggacttcaagttgttcattcctccattgattctttctacacaagtcattgctcttcaccaacttaaaacctttcaagttctctccctgggctccttgaggcaagggactgtcttattcatcttttgtgtaacttttgcacctaacacaatgcctggcctagaccacacagtcaataaattgtttttgaattgccgagagaatgaatggatgattgcatattaagggagcaaagggacctagtcctctagggaaccagggaaatcgctgacaagatgataccagtcactgtggtccgtaaggatgagtttggaaagtggggacgaaagacattctatgtagaaggaactgcttttgatacctcttcttagtgcttaatgttgtaacctgtgcttagtcaattccacaaacatttattgtgttcttttcagcatatgtttctttctttgtttttatatttaagagtgatgcttccatttttgagaagaatatctcactaattttttatatcccacagagcagggaatccttcattatttatagttaggacccagacactcagtgaatcaattactttactcttgactttttcctgttgcatatgtttccaaacagttgacagtgaaaacatagtggtgggccatgcttatgtgagaggtggaaaaatgtaggtgacctctttggaaaatgggtggaatccaaagtaaactcctcttttgagagatttttaagggctgaaatcagtggacataccacatataacttttcatcttgaatacttgatgggtgtgtgcttttgctcatctatgaaagccaagattggctattaatatcaccatgccatcgaaaagcaagattgctctggtttgggggattccattttagccagttatggaagaatattgataggccctccaaaaatataaccttgaactttagaaatgtacagaggggagagtgaaggtggggtgatcttggacaaagttggatattagaagtgggacgatacttgagagtttggaacgtgggtactgaggaaaatgtgcaataagaagaacttgagaaaaagcattctggaatagaagggatgggttgaggtgatgttttaaaccaagttccgaaacttccactattgcagctattgatgagtgttggctacgcttggggtgaaagtaagatgtgcttgatttactctctgtaagtagtgagttaatgcatataagcaaacatgaccataaaggcaggagcttagggatgaatatcccttgtcttgatgtcagggacttacacgagatagaaatatgcataggagtgaaagtgtaggtggttatcgagagtgacaccttccttttcaggagtaagggacacatgtgcccagtgctatttttcatacagttttcatatgcttatcttgaacttgaagaacccaagttgttgtaacaataggtggcaagaacaaatatattatgaggatggcctagtaaaaaacagaaaagctcagtcagcagagattactttatataaacataaatgttctatttcagtattttaaaaacattttaacactcagcagtacattttatatcatgacctggtacacacacaaacacatatgcatgtgcacaggtgttaaaaataaagccgaattacaagttctacaaaaaatattataatgctttttaattaatattcaatttttattttaaaaattctagtctttatatactaaactgattttataacttgctaatgggtcctaataagcagttagaaaaaaactgttctaggtattgtggaaattagccttaatttgtttattgaatagttgctagtctggatgagactttcgttttctttttgtgtggatttctgtcattctatagaaagttcatacccctatgcccctctcccttgccagattattttttctgtgtaagggtctttacttgtttccaaatcagattaaagtgagtaatacgtgatttgggccagctccagtgtgcatcatcatcatcatcttgatccccatcagcatcaaaggtggggctgattcatttagaatggtggcaggagccacttaactccctgtttatttagattatacttgaagaggttgttgactttcaggaataaggggaagctgaggttacacacacccaaaggatgagagggaggtggggaagatgacccccatatattgttcagaaataaaaaatgaaagcatgttgttagtagggacagctctttgcattcaaagacacaagagcttaattgttgtcattgtccttatcattaaaatcttgctttcctcttccttcatcttttcccgtcttctttgtcccttatttattgagcatttatcaagtcttcctgtaggtaaggttgggcatagaaagctcagttattgtcaagttaataataaggtgcacttgagtaagggagtgaataattatacatgtaactattagtggcagaactctgaatatcttggtcacaagttacagaggatcaaccaacacctttaaggaggtggctgtttggctggcctctgaaagaggtaccaattggatgttattttgagaggtatctgtatgtgtataggttgtagcataggcaacattccaaaaagagagaatggggcaagtaaatataaggggcttgttttttatttagaggccaagttatagaaaagatagttgcacattttttttttttttgagatggagtctcgcactgtcacctgggctggagtgccgtggcgcgatctcggctcactgcaacttccgccttgggttgaagcgattctcctgcctcagcctcccgagtagttgggattacaggcactcaccaccatgcccagctattttttttttttttttcatttttagtagagatggggtttcaccatgttggccaggctggtcttgaactcctgacctcgtgattcacccacctcggcctcccagagtgctgggattacaggcactagccaccgtgcctggcagttgcacatatttttaatcactagtctcagactatgtgtcctgggatgcagcttctcagggtggcatgcaagaccttagacaaccgaaaggaacagcacattcacagttaaaagtgctttgtgatgtgacttgactctgtagagcacatcaagatgagcaccataggagcaagcttagaaagggagatttagaggcacattatggcttactttgaatgacaggctggaagttaagataaggcatgaaagcaggccttggtctggcccctttcattatctcatttaatgctcactcacactccatgaagtacctactctaatgcccattttatagaaggagaaactgaggcctagagaggtgatataaatgtctaaggttacacatctgaactttaactcaggctgtaaattcccacatcaccatcagtgcaccagagcagaggttgaaaactggtggtctctgagctcagtatacctcagagttctgtcctgtttgatactgtatttaaaacattaaaaaaaaaaccatggttgctaacgtgtaaaaatgggggacattttcataaaaaaaatcgaaatgtccagctgctcctgcaacactgaaaactctggcagccccagggccatattccttcctgcaagaaactgccagatcttttgaccatgtctgtctgagggagatgtgtgtgctgtggctgctactgtctcagttcatcctgttttctcccagacactgaggctcggtgttagttgctgtttattgttcttgcactgacaggtttgtttgttttaaactcctcgcctacctcgttcctgtaggctaaatggattgaccctataggtgtatgagtttgaagccttggcacatagccttctgttagccaaggatgattggtctagtggagtgggatgcccagaagccaggaggaaatgagaatagatggaactagggttttagccttgggctggagaagccatagggcttggtgaataaattacttttgcgatgagagggagggtaggggttgggtaaacatatgtgacttttggaacctggatgactgggagaatggtgttgctcttaaaagaaaatggaaggttgccaagagcacctgggttggaatggattgtggcgttgggtttgaggttctgggagagcaagaacccagaagaatgcttacttgagccctgtgagaagctgggaaaatggaactgaaactctggagatagggtttggggctttggctttgtattggctattggatttgtactggtgattggtgagaggatgagaatgtcctgggggagagcttccttttggaaatgggaagaagtgggttgaggtctgaatgataaaatgaaccagctacaaacagttcaaagtctgttattgactttttggggtcaagtgccatatcttgcaaataaatcaaatgtttatccgaatagaggagtaaaataacagtcttcaacttttgaacatgggaaactgataaaacatctgctcatagaatcaaaggcagatatgctgtttgatgggtgacacctgtaacttatgtctgtgcctatttcactgagccttattaaggtaaaactgattctaatagtgaccttttcttggtatcatagatgatataaaatgtgaaaaagaagttgccggagctccaagatggggaaaaaaatgccagaggaaaatgctctctgcttgagatttatccttgcttttaaccagtttagaatggaatgtccttttcaaattcagagaagcttccccgcccccccccccccccccgccccacctcccttggcttgtttgcttaggattccctccaacttattgtttcttaatcagctatgtccacctcagctcctctctcttctcctacttggttcccttttgatccctaaaagtcttattgttttaggacattctaagcccaagtgcggtgaatctgtctcagatgtgagtgttgtacatggaaatcttccaggagggcatttcttttgttctcatagaggcttgtctccttctggggccatacaactctgacatttttggtttaattcaaattggtgtttttgtttttcgttcctagatagctttatttcattacatgtgcacagtaatatgagttcctatacattttttcctagaaataaaataactttattattttgttttatgtttttgatactagtcatattatgacaggaatatgtgtgcacaatacaagatttgaagtacaggaagggtttacagtgaaaccgttttaattcagggactgtccatagatagagttcagtactacctgaggtttcgggcattcactaggggtcttgaaatatatccccacgcctgcagaaatcaatcaatcaatctatctatctatctatctatctatctatcttttttctttttcttttttttttttttgagatggagtttccctctttttgcccgggctggagtgcagtggcgcgatatcggctcactgcaacctctgcctcctgggttcaagtgattctcctgcctcagcctcccgagtagctgggattacaagcatgcgccaccacgcccggctaattttgtatttttaagtagagacagggtttctccatgttggccaggctggtctccaactcctgacctcaggtgatctgcccgcctcggcctcccaaagtgctgggattacaggtgtgaaccaccgcgccctgcctatctgtctgtctatctatctatcaatcatctatctcctgtgtatctggagataaataccaaggattggaattgctgaatcaagggatatttgcattttaaatttcagtataggctgtgccatgaattggatttttgctttgtatttgtgaagcaatgtggtgtggtgataacgagaggatgacccttaagactcaaatgctagtctgttgtctggtgtaaaccaattgtgtggcctaagaaagtcattttcttaacctttgtctttgtggtgctttcctttcctcatttgttaagaagggcacaggcttagttatttctaaagtttagtaatttgttgattctctcagtctcactcttttttggtccttccagtaaatggagctttatgatttttttttttttttcctgtgtaagtttgagtctataaagaactctgggctttggaagccttgctaaccacagctttactttgattgttttaaagcactatgtctggtgtgtgctttacgttaaaagcagagcttatatggctgatcacctttttaaaaaaaaaatatggtgagtggtaagtaggcatttagtgaccaggaaactcatatagtcagctttttattattgatcaagagtggaggcaatggatttttagacttaaggaaaaagttgtatttttataatagctgtaaaaaaagcagtagggctatgatagacagtttttaagaaacagcaaaattttatttatgacttcggaacagaccataagaggtagcttttgatcttttgaactgatcttttgaatttgatcttttgagcttttgatattttgtaatgtaaaggtaaaataggaatttttggaaattttgagatatttagccagtattgcttaaaaagatgattggatttcctgctgattgtcaaactagatctatttaaaaactgaaacccaagtaaacaaaatttaatgggaatttggccaagtgtggtgtccaagtgtgattatagtggatcacacctgtaatcacagcactttgggaggccaaggcaagaggattccttgagtgcaggagtttgaggttaacctgggcaacatagtaaaactgtgtctctacaaaaatttttttaaaaattagtaaggtgtggtggcatgtggctgtagtcccagctactcaggaggctgaggtgggaggattacttgagcagggaggtcatggctgcagtgagccatgattatgccactgtaccccatacaggctgggtgacagactcctgtctcaaaaaaaaaaaaaaaataaatttctttatttcccatactgcattttttctttagaatttgctcctgcaaggcagggcacggtggctcacgcctgtaatcccagcactttgggaggctgaggcaggcagatcacgaggtcaggagatcgagaccatcctgactaacatggtgtgaaaccccgtctctatttaaaaaaatacaaaaatttagtccggcatggtggcatgcatctgtattcccagctactcgggaggctgaggcaggagaatctcttgaactcaggaggcggaggttgcagtgagccgagatggcactccaacctgggtgacagagcgagactccatctcaaaaaaaaaaaaaaaagaatttgctcctgcaacattaagcaatgtatttggattccaagttaaaagacttggaatttgggttgttaatataaatgcatttcttctggaaaatttttgagcccttagttactcattttaggaaaatcacttactaaatctttctatctctctttttattttttttcttgagatggagtcttgctctgttgccaggctggaagtgcagtggcgtgatcttggcttactgcaacctctgcctcctgggttcaagggattctcatgcctcagcctcctaagtaggtgggattacaggcatgcaccactgcacccagctaatttttatatttttagtagagatggggttttgccctgttggccaggctggtctcgaactcctgaccacaggtgatccgctggcctcggcctcccaaagtgctgggattacaggcgtgagccactgagccctgcctaaatctctgtaagtatacaaatgtattcaactaggtgtagagtagcaaaaaaaaaaaaaaaagagagaaacaatttaactgttctataggctgggcatggtggctcacgcctgtaatcccaaccctttgggaggcataggaggccagatcacctgaggtcaggaatttgagaccaacctggccatcatggtgaaacctcatcactactaaaaatataaaaattagccaagtatggtggcgcacgcctgtaatcccagctactcgggaggctgaggcaggagaacctgggagatggaggttgcagtgagccaagatcgcaccaccgcattccagcctgggcgacagagtgagactgtctcaaaaaaaaaaaaaaaaaaaaaaaagtaaatgttctacagcagcggttaggtttatatatattcctagaatggaattttatgtaatcactaaaaatactatttttgatgaattttcagagacagatctcattttaaaagtagttaccttttcaaagaggcttttgttggctattccatctagtttgagccttaattattttccgtatcttacagatactaccttatatgtatattatcagtaaatacaaggtatgtctgttttgtactctgtgtgtgtgtgtgtgtgtgtgtgtatgtgtatgtgtatatgtttatcctgtgcctagtatactgtcttatgcataggaggcacacagaaattgttgcaatgaatgaatgaccgtagagagtacacaaaatattacatgaaaaaagcaggacactcaaaacatagtgtaattcctttcatataaattacgtacagttctgtagtacagttccataaacataaacatgaaacatagtacactttcatatttgtagttaacgtatatatatggatgtagagaaaaaaaagattggtaggaaataatcctaaattttagcagttatctctgtgctgtgggtcatgcataattttgaagagacaatctttaaatacaaatggatgaagtaaatattcaaaattatgtcagctagataatgtattttaccctttccacattaaaggtggtcaccttacctaaaatgatgtattataatgccatggccttttctcctcttgagtaaaatgtactgtacctctctagtgtgacaggttttatatctactttaggattaaattatgatctaagagttgcatttttaagtaactggctttaatttcacatcagttgaagttaaagggtggtgaaagtatattagatctgctgcaagtgtgtaattataattattgacacattttcaaatgctctcttaagtatgatgcattgcccatgattttgacagctgtgactacattaaacctgctggaatactcttttcacaaagatttgtttaaacttagaattgtcagaaggattctccataaagtggatgaacacagatttagaggtgaaatggtggttcatttcctactgtgcctgttgatttttagtctgttaaatgttaaacagaagattacctggatttagttttcatgtcaagaaacctgggaattttattttatttttatatagtataaaaatgtgtggtgctattcctttgtgataggactgtatgcaatgatagcacagaatctcattctgtctcctgctgaaggtccccaaccacacaactccaaactgacagacttgatgttgcaaagcagccttattttctgaacgtctccttcaacaaagttcacatattatctccttttcatggccattctatccttctatatagatttattaagtagctactgtgtgccaggcactgagaatatagacagaaaggctgtcagagagctcagcttggcagaggcagaaaaagaaatagccaatatacagtaaagtgaagtgccacattagagctctaaacataaaattgggatgtacagttctgtttgagggcactagaggtcatctcagggaactgatgttcttgagtgtcttcaaggttaagtaggatgttatcaggtggggaaagggccttctaggcacagaggctttcagtagagacagcaacctttaaaactgaatgtggctagaaccttgctactcagcgtgtggtccttgggtcagcagtgatggcatcaatagaaacacagagtctcaggcttacctcaaatcctgctggatcagaatcagctttgcagcagtatcccccagtgatctgaatgcttctaaaagtttgagaaacactggacttgagcgtaggaaggggtaaaggatgggagagcttggaaagtagaccacctgcaaaggagattggattttttttttctagcaaaaagttgataatgaagaagtcacattattagatttatattttctaaaaattgtctggaagtatatgtagagcagcatctgccaagaagctttcttgaaaccttaattgtgtataaggtgcttcaccaaaaaaggtcctcaaataagtttgaaaaatgcaggatattatattcttctcttggacaatgtaaagtatcatagtaaattgaaagttttgagaaattggctttgaagaaaaccattagcttaaccacttatcctggaatatccctagggtgttccacatttattccacagtggaagtctttgtagcctcacagctgttaataccctaggggtggtgggtagcattctgctgaacacattttggagaatgctagcactgcttcctaaaccttagacactttgccttacctgagtagggtgactgactgtccgggtttagtggagactgagggatatctgggatgccagactttcactgccgaagtgggcaaattggggtggagttggtgggtacccttcctagcagtttaccacatatattacaatttgctttattttctttaggtgggctcagccttctttccttcaattcctgtttcagtctcattttcatggactggtccccagacttgtctgcattggaagcacctggggagtttctaggcctgagcctgtgcccacctcatgaggttgtgatttaattggtctggggtatgtattggcccttggggtatggggtagacttttcaaaaggtcctcaggttcttcaaactcatgaaagtttgttcaaagcaattatacctgtggaaatgtagtcttgagatgctacttaagaatttatttcttaagtaaaatctataatacaaaaaacgaccattaaaaagaaaaaaaagttgaagaatcacctagcagcatgtgaggcgaccaccagttgtacatgttccacactttgggaaacacttagggggataatcgaagtgtgggcacaaattagggggctggaacttatttggtgagtggtgtggctggaaaggatattgcagatttcagggctgtttgggagtctgagcccatgagatgtggcgattgatctgatctgtagggtggaatagagtaggaaaaggagaatctgataactgcaggcaatctgggggtagatgatgatcatgttactggaaaggggtcccaatccagaccccaagagaggattcttggactcgcacaagaaaaaattggaggcgagtccatagagtaaagtgaagcaagtttattaagaaagtaaaggaagaatggctcctccataggcatagtcccccaagggctgctggttgcccatttttatggttatttccgaattattttttaaacaaggggtggattattgatgtctcccctttttagaccatatagggtaacttcctgacattgccgtggcatttgtaaactgtcatggtgctggtgggagcatagcagtgaggacgaccagaggtcactctcgtcaccatcttggttttggtgagttttggctggcttctttaccgcaacctgttttatcagtgaggtctttatgacccgcatcttgtgccgacctcctatttcatcctgtgacttagaatgcctaactgtctcggaatgcagcccagtaggtctcagccttattttactcagcccctattcaagatggagttgctctgattcaaatgcctctgacaatcacataacagaacaggaaggtgtggggaatgcagtaaggtgacagactgtatttgagaggacttgggatgtccaagtagagctgtctggtgagttgtcagaagaaaaacagatggggcatgctggctcatgcttgtaattctagcactttgggaggccgaagcaggaggattgctttaggccaggagtaggaaatcagcctgggcaacatagcaagaccctgtctctattaaaaaaattaaaaataggccaggtgcagtggctcaggcctgtaatcccagcactttgggaggctgaggcttgcggatcacctggggtcaggagttcaagaccagcctggccaacatggtgaaaccccgtctcgacaaaaatagaaaaattagcagggcgtaatggttatgtaatccataaccagtagtaatcctagctacttgggaggccgaggcaggagaatctcttgaaccctcaagatggaggttgcagtgagccaagattgcgccactgcactccagcttgggtgacagagcgagactgtgtctcaaaaaataaaaacaaaaagaaaaacaattaatatatttaatagcttagagaggaaagggctagatacagatgagagcctctgcttcctggtacaggaggcagtaaagttcaagtggggatcagaatttcctgagagaaaggggagagggtggatctgtcaccttggtccaagggatgagttcttggagaaggaccttgagagaagagtctgggaacagcctgagaggtaggaggaacactgaagagaggctcctatcgccatagagaggaagggaaggctcctcccaggtagccctgagaacccagtaagagaacagctcaagagggcattttgttggtaagttagtcatcattagtagtgttcgtaagtttagcataaaggaggaaaccaacttttagtgggttgagagggaggagaccactagatcaagtgacttttttttttttaagtttttactgacgaaaaagcctggcatagtgtgggaccttagggactaaatatgggtttgtttggggagtagtcatcttctggttactcatggaagttatgtcaacaaggaagaaaaaattacaaggagcattcacatattcacagaaaaagtgccagagttacctggggctccataaaatccctttattttgaaatcataactactcaccttttctccccatcttccctaaagtttgctctgttattctctagacacaacaatctcaatttctgaattgatattcttataaatgtcattaggatttcttacggtgctgacaaggctgcttgtgattaagtattcaacctttgtctatatgtggtacacatttctggagggctttgtagtttaccaaagcaacactgcattttacatgatcctcttaataaccttgtacggaggcagggcagaaaatgatattattttattttacagggagaaaaaagcctttgaggtttaaatatattaaggaggacctgctgatgatgaatgatttagtgatggatccagggtgcaattctggtctctctggtacagtatttcttccttatggtggaggaagatgggggaagggtattttcttctttttttttttttccaattagtttataatttccttgaggacggggaccatgtgttcattgttgagaccgtgggtgtcggagatgggtaggagagccctttggtccaagctttaccacacacaaggacttcacattgtcttgacattacctttgtatcacagagtcccagaaatatccagaattgtgtattttctttttctttctttttttctttgagtcagggtcttaccctgtcacccaggctggattgcagtggcacaatcatggctcactgcagcctcaacctcctgggctcaggtgatcctcccacttcagcctcctgaatagctgagactacagtgcgtaccaccacacctggctaatttttgtattttttgtagaagtgggatttcaccatgttgcccagggtggtcttgaactcctgggctcaagcaatccacctgcctcagcctcccaaaatgctgggattacaggcgtaaaccactgtacctggcccaggattgtatattttcaacaggattgaaagaaggtagcatggatcatgtaaccttgaacttgcgtctcagtattggaccatgtaattatcttgagaccagcccaatagtattgcttggcatgttttgtaaatatttaaaacatacacaatttttgtcatcctatttttacatttaaaaaatattttttgataccagaaatcatctatagtggaagcggcccaaacctctctggacttcaaagggacccttatctgtatgtgcatggaaggacctgaaaatgaactagcccctgtaacaaagctcaagtccagtaaagatgatgttttgtaaccaccacggggcacaccacaggcactcaataaatacttgttagtttgaattgagggaggtgttgttttgtgttaaacattctccacatttatcacaatgggccactgacaagttttaattttttgtaatgatctttcccatgagtcattatagatatggcactaggatttggggaaggagaatgatgaaagagaatacagaactgggatcagcaagttttaggacaagagatgagaagttttgagtgagtgaatagttgaaagcaggcaggagttgctcaggggaaactggaaataggtggaggcacttttaagacagcagaccgcacggatatgaggatgagattggagtaatgcagagctgatgatatcttagtgggggaactgaaggcttttttcaactttaattatagccacaggaaaaaagcacattatagcactttttttctacctctactaagggctgggaggatataatctgtctcgtagagtcttgtcaaagaatctgtacttcagactacactgaaatgtattttttttaaagtttttggggtgtcataggttgaggaagaggaataagcatttgattccttgtgtttacattaaaatttcaagctactatttcatgatgatgcaaggaactttttagtcattgaagagatttaggcggatgagttaatgtttggtcatcagaaaatgtagcatgaggagcatgtttctcttgggaggaaaaaaaagcaaaatatgagtcagacaaaacatcaagtcatttcccagcactcgatgcagccacccttttgctgaaggaccatcgaccctgcaagtataattcagacagtaatgaccactggcatttgaggcagactttacagtttataaagctcttccccctcaagaccactcacggtgttgctgactctttgtataacattggcacttctgatgaggggggcacaagtgagttattcttctagggaaggtgctttgatttaaaacctaaaaatgccatctgtaattcaaatgggacagagttttcctttgtgaggactcatcagttgttcattgacattggcatggactgttgcccagtctggagtgcagtggcgcgatcttggctcacaacctccactttttgggctaaagtgatcctcccatgtcagcctcctgaatagctgggaccacagatgaaagccaccacgtccagctaatgtttttttttgtgtgtgtatatatatatatatatatatatacacacacacactttttttttttttttttttaaagagacgaggtttcaccatgttccccaggctggtcccaaactcctaagctcaaagcagtctgccctccttggcctcccaaagagctgagattacaggcgtcagccactgtgcctggccagttcgttggcatttttgaaaaatgctaaaagtcagtgtactagcctgtaacattgggagagtgtaaggtttgtcttatatacttattttatttttgagatggagtcttgctctgttgccaggctggagtgcagtggcacaatcttggctcactgcaacctctgcctcccgggttcaagcgattctcctgcctcagcctcctgagtagctgggactacaggcatgcaccaccatgcccagctaatttttgtatttttagtggagttggggttttaccatgttgaccagaattgtctctatctcctgaccttgtgatccacacacctcagcctcccaaagtgctgagattacaggtgtgagccattggtcgcacccggcctgaaaaagagtcactcttttttttttttttgagacggagtctcactctgttccccaggctggagtgcagtggcacagtctcggctcactgcaagctctgcctcccgggttcatgccattctcctgcctcagcctcccaaagagctgggactacaagtgcccgccaccatgcctggctaatttttttgtatttttaatagagatggggtttcaccgtgttagccaggatgatcttgatctcctgacctcgtgatcctcccgcctcgacctcccaaagggctgggattacaggcgtgagccactgcacccggccgatacactcttttttcgttttggatttgccagtgtgatggcagaacactgtcattgtcttcctctatctctgttcttgatctttcagtgatgtttttatgttgtgttccattttgctgggtatcaaataatcaccaagtctttgtgcaaatcaagagagataactagctagaaatatgtgtgtggaagataggtatgaaatgttaggaagaaaaaaatgcttctttttttttttttttttttttttactcctttagggtctgattgattcatgcttttttatttgttgaaattttttgaatactaactatgtgctaggctctgtgttgattatgtgttggtgacactgagaccaaaggtgctattcctggcttcaagagaattcatggcttagtaaaaggaacacgtaaatcagtgattacagtacaggttggcaaatgcgggtgtgcacaatgtacagcagtgacccagagggggaaacttaacctgcgttagggagaaggatgtagggaaggttctgaccctggaagatattaagtgaggacttgaagaataagtagaagttagcctggtaatgtagaggaagggcattttagcatagggaaacttcattgtaaagatagaaggcataagaagagcatagtaccagctgggaatgcaggtagtttagttgaactgtagcttagggtgcctgtgggaattgatgtgacataaggctggagaggtgtgtaatggctatgtcatgaagactacttattgcttcctaaacaattcaggtcttatcctgaaatatgctagctcttggattttagggaggaaaaggatcagattagatttggattttggaacggttatgagcagcagctttaagaaggttctttttcaatggtgtctattttttttttttttttttttagaattgtgctattctctctctctttttattttattttatttttatttatttttttaaattttattttatttttattgatcattcttgggtgtttctcacagagggggatttggcagggtcataggacactagtggagggaaggtcagcagacaaacaagtgaacaaaggactctggttttcctaggcagagtgtttgtgtccctgggtacttgagattagggagtggtgatgactcttaacgagcatgctatcaatggtgtctattcatctgagctttagactgaattttgtccttcccaattgatgtgctgaaaccctgaccctcagtgtgatgctatttggagatgaggtctttgggaggtaattaggtttaggtgaggtcatgaaggtgggaccttcctgatgggattagtcagcttgtaagaagagatatcagagaacttgctatctctttccacatgaggacacagcaagaaggctgcccctgttagccaggaagaggaccctcactagaacctgacactaggcatcctgatcttggacttctagcctctagaactgtgggaaagtaaatttctgtttaagccacccaatctatgatgttttattatggcagcctgagtagactaatacaatctatttattttttgggtaattgtgaaactaggaacaggaaggatattatagtaattcaagtaagtagcaataatttggctactctattttgatttaaaaatatttgggcatggaacaagtcgttatttaactgaacttctagttttgagatcttattgttaggatattactagctacaataagttttatgagagaattttctcccttgaacatctccacatcctaccttttattaaagtaatccactgatgccctttactatagaggctttgggtcttttcattgttttccggtcagcaggttggtacagctgaactctcagtacctagtgcctgagtgttaaatctgttcgacagccctctgctttatctgattttgatactatgacatttatattgctttaaaggaatcttctgtgtatggttttaggagttctgtgggaattaataccatttagaggatcatataactatggcagatgatgtttgtgataaaattggtacctatcttgtgtatgtttgaataactatttaaaagaatatttttcatagttttgtttttatgtctgaagatctgtcttcaacattttatccagcacttaacttgtgcctgatatttgagtctagtttccctttctttttccaaggtcttgctctttttttttttcttttttttttttgagacaggctctcgctctgtcatccaggctgtagtacagtggcatgacctctgttcactgcagtctccacctccctagttcaagcagttctcccacatcagcctccctatagctgggaccacagccatgcaccaccatgcccagctaatttttgtattttttatagagatggggttttgccatgttgcccaggctgttctggaatttctgagctcaagcgatccacccgcctcggcctcccaaagtgctgggattacaggtgtgagccactgcacctggcctattctttatttttttcaactctgttctttctccccagttctctctaatttgtcctctttattggccttttctcttgaatttggaaataggcttaagtattctgtcctttaaagtgttttgatgcctatacctctcataagccccttcctgaggaagcatttaaaaaaatgaatccacattcaatgctcttgcctcttcagcctgtagtcttcttcagaacataataatcttacattgctcccatgtattacatgtttcggaagtgcctaccaaatgccaggactgggcgggtggggtgtgggtggtggtggtgtgtgtgtgtgtgtgtgtgtgtgtgtgtgtttctctgtctccctctcaggagtcctctttttagtggtagggtcacaagatcgggaagagttatttagcccatctctccattgcctgcagttgctctgcattttaccctctgagtgaatcctcagccttcactgaaattctacaaagttaggggatgcaatatctactaggagcccactctgcctttggagtaatctgactgacagagggttttttggcctataataaatgtagcttctatttatcctttgatcacagttcttttcagctatacagaatatagagtataatagtatttttgtgtgattagagctgtcatattcacccctaatatcttttttctaagaatgtctccatagcttccactggtcgtcaccatcctgcctgccttgttgctcatacttctgtttgattgagtctttaaaaattggtttctagagctgattgcgatattcctgactgggttttctctcctaattttttgacttccatgcttgtattatgcagctcaaactgctatatttcaggtggccacttggttttacttgaagagttgatcaccaacagaaatctcagtttttttccatagatggtactgctaggtcctgtcttcctcaacctctccttgtctgcttatacccttgtcttttattccctttactgcatatgggatcttaaatttaccttaagttaactttccgtttgctaggtcctgcccatagcagtttgcattggattccatttctatcattttagggaagatacgggtttttctgaaatagcaccctttgaatgtagtaacttaacagatctgtctaatctgttaagatagatctgttaagttaagatggatctgttaagttaacagatctgctaagctaacttttcttttttttttttggagacacagtcttactctgttgcccagactggagtgcagtggcgcgatctcgactcattacaacctccgcctcccaggttcaagcaattctcctgtttcagcctcctgcatagctgggattacagatgtgcaccaccacacccagctaacttttgtatttttagtagagacggggtttcaccgtgttggccaggctggtctcaaacccttgacctcaagtgatccgcctgccttggcctcccaaagtgctgagattacaggtgtgagccactgcccctgtccaagtaaacttctttttctttttatcttttgactttttatttatcttgatcacaaatatttcataagagatgttgtcaagtctagatgtatatgttcccttgaactgccagcttaagaatcttaacgagaaaaggaaactgggttaatcttgtatgatttgttcttactattagggttcgcagggattaatactttctaagtgtttaaaatacattctcaagtcttgcctgggacttggtctgagtctatgtagtctgttggcatttttccctctttttttttttttgagactgagtcttttctgtcgcccaggctggagtacattggcacgatctcagctcactgcaacctctgcctaccgggttcaaatgattctcctgcctcagcctcccgagtagtttggactacaggtgtgcaccgccacacctagctaagttttgtatttttaatagagacagggttttgccatgttgaccagactagtctcaaactccagacttcaagtgatctgcccacctcagcctcctaaagtgctgggattacaggcatgagccaccgcacccggccttctcattttaatttttctgaagcatctagtgattacttgttcctttctgacttcattctttgctgacctcttttctccaagttttggaattttctgaggttgcttttcctctctttttcaatcgcatcttttaagattctctatgcttgcattgtccagtaaggtagctactagccacagtcaacatagaaatgttactggtttaaagaatctgcttatttcaagttgaaagccagaacaggaaacactgacacctgggtaggaggttaaggttgactattccaggaatggagagaggagcaggaaagtggccacaatttaactagttacacttgcttgttggctgttgccaggttatccgtgtatgttcctggcccctgtctcctgctaacaatgagtcattattgcaaataaagtaaatattaataaatctatgtgtagaatatttttaataaaagcctatgtgtagtgtgccaaaagataatgaggtttggaagcaaagtaagttcttaaattggcagtttcgatgcgtgattctgtgtagtactgctaaacttgctagcttattcaaatactatacaataatgtttgtaggcatttcctagtgtttggatattttctgtaagctacagttttgatatatactactatatttcacattttttattaaacaatttaaaaagatgtttataatagtgaatgaacactattggaagtatttaaaaaataatttataatttcagaaattccaattttttccccgcaaattttgaagattgatattgatagagagtttgaaacaatagtacatagtgcttgtccaaagaactgtttgtttcttttgataatgtgataggtacagaaattaagatagtgtttagagactgttatggtaatttgacattgccatcagtacctgtgatcagtggattcaacccattgaacaaggagttttacaaaagtattggtccattacagatagtaatttagttgtataagtactggtctaggtgagaggtagtgatttcttggaccagacttgaaagtatgagaagagattggttggaatcaggatatactttgaagacagagccaatgggatttgctactagattagatgacagattattctagattatctttccctctaaactgcttcatttgtaaaatgtgtgtagttatgacagcaacactcatttttgttgtagctttgtcagatgtttctttgagcttgctggaaatccctcatgttcattgctgctaataatcatctttctaatccaatcatgtaattcccttgactttcaaccatcaactgctcaccattatagatacaagaaatattaaactgcttaggttgacttttaagatatgaggtgcgacttctttcagactcttttccatgtcctcttttgctcctgacaatagcccaactagactgcctgctggtccagtcaatctctttctgcataataaattatcccaaatttgatggcataaaacgacaaccattttattgtgctcacagtttagtgagtcagggatttggaacatgcacagcaaggacagcttgtctctgttccacaatgtctggggcctcagctgggaattcttgaaggttgggggctggaatcatccaaaggctcattcactcgcatgtctggcggttgatgctggctgttggctgggagctcagctggggctgtcagctgaaacacctacatgtggtctctctgcatgggctattttgagcttcctcatagcatggcggctgggttccaagagcaagtgtctcaaaagacaggaagtggaagcttccagtttcttaagatctggttctggaagctgttacagtgtcacttccaccatattctgttggtcaagctgtcacagagccccgttaaagagaaggagatatagatcccacctcttgatgagaagagagccaaagaatttgggggccatttttaaacaatcaaagctatacttcattcagatttccttagttttccccagtgtcctttttcagttacaggatctcacccaggttacattacattgagttgttatgtcccctagggttcctcttggctgtgatagtttctcaaactctccttgtttttgaacaccatgacagttttaagaatgcagctctggtattttatagaatggggtggtggggggatatttttaaatggccacatcctactattcaccagacttctctgtctttctgagtctctctgtcagctgctctctgtctccactcctcgccccctccccagttcaaactccatctctttctccatgcagtctttgtcatgtctcatcctctggctaaaatcagtttttctctcttctgtgttcccatagtattactgtttgtaattcttctgtggtcatttttccgtgtttttctttcttggtagattataaactctttgaaggtaagaaccatgtcttgcttacctttgcatatctcatagcaggtaggttttttgaacggaacattcaatatcaaactgagtctcacatctgacacccagatgggttgggacttaacagtggttaaatagaaaatataatgagaaaatttaaaacattccttaaaaacatcgtttctgatgttgtattttaagacttttaaaatggactctctgttgtagagtaaaacttctaattttttctcccttagccataaaattaaaggagattagctttttttgatattatcaacatcttcctgctcaggtcaatctctgataggcatgtcctagtgtttttttgtgaactttagatctcagtccattactggatcagtttagggagtcacacccaagactagaaataaaaggaaattgaagttttgaataaagcttgtgaattgcaagggtaataattgtttcattaaatttgtgtttcagttttatatgcatgtgtataataagttcaaatgtaaaataggtattaaaattttttgaaagatactctcctgtgcaacctcattctaaactgttgatgttctggttcatttctttggctttttctgttttagcttatttcttctggtttcctttctgagggcttatatacctacatatcgattctggggaccatgcacacatgttcctttaatctttacctatccagcctctttttaaaatagaggaatataactgctattctcagtttcctagaatagcacatgttgtgttttctcttctcctttggagactttatacctactctcctgccctcaagaggccaggaggtggaattagcttattcttttcttttttcttttatgtgtttattgaagtatagaatctatacagtgaagtgtacaaatctaaagtatacagctcaataattttttgcatttgtatttatccctataagtatcattgcagatgaagatgtagaaacagtttcatccatccagaggaggtcagtttattcttaaattgtttctggaacaaggtggtggtgtgagtaaattagtagattctctctgattccttcatatggcatatgtaggttataatgtttagttctgaaggtcgcaaaggtctgaagcatctgagttaggaagtgttaaaacagggagatgggatgttgaatgtgagctttggcagaattaaatgggatgagcttgagtgagccaaggggaaaagcaaagaggagtcatttcatgaagaattcaggagaagcaaggtttatttgaatttcagaagggaaaacattaaactcagtttgccactgctgctgtaacaaatcatgacaaatttagtatcttgaaacagcacaaatttactttcttccagttttggaggctcttgggagaatccacttcctttggcttgtggctcttcctccatcttcaaagcatattctttccatctctgtttccatcgtctcactgccttctcctctgtgaagttaaatctccttgtctctttcttaaaaggacatttgtgattatatttagggcctacccggataatccaggataatcgcctcatcccaaaactcttaatttaatcacatctgcaaagtccctttgtcacataagataacattcacaggttctggggattagggcatggatacttggttttgtttttcaaggatctttcttcataaagggaaggtctgctatatatttcctgctagtttattctcctttttaatgctagattaatttttctaaaacagcacattgtacattttatttctttgctgaaacatctttggtgactccccattggctaatacagttaatagggcctagactgacattcagatggctattgaaccccaagtcacatttcaagtttttctcctcctctttcatcatggatgcagcagcatgcattttctcattgttgcctccatgaccggcttgtctttgcttgctctgacttttcctcctgcctgtggggccctttcaggccttcccagcagcattcccctcaccatctgtattagcttcctagggctgccataagaaattaccacaaacaacagcaatgtaactgccaaagttgtggaggcctgaggtctgaaatcagggtgccagtagagttatgctctaactgatggctttaggggagactctttcctagctcctttcagcttctggtatctctaggtgtttcctggtttgtggcagcatgactccaatgtgtaccttcatcttcacatgaccttctctctgtgcctctccatgcgtctctcataaagatgcttgtcattggagttaagtaccacctacagaatccaggatgatctcatctcaagattcttaagttatttacatttgcaaagacccttttcccaaataaggtcacactcacaggttccaaggttagaacgcagacaaattgattggcaggctactgttcaacccactacactacctcagtcagcagtcataacttatttctgtgacctcttgacatgactggcatgcctacacaacttattgggaccccatcatctctatcttactatttttggataattctcacctctttcactaaaccataagtccttgtcttagtccatttgtactgctgtaactaaatcccttagtctgggtaatttataaacaatagacactttttgctttcagttctggaggttcaaagataaaggtgtgggcaggatttggtgtctggtgagggctcactctgcttcaaagatggcaccttcttgctgtgttctcacatggtggaagggggggcccagggagctctttttttataagagcatgaatctccctaatgacttaatcacccatcaaaggctccccccctcttaatactatctcattgggtattaggttccaatgtatgaattcttgcggggacaccaacattcagaccacagcagctcttgaggtcaaaagggtttcttttgctctgaaaccctcaattcctagcagggtcctagctctgtggtgcttcagaaacagcatgtatcagatgatcaattttttaatttttaaataaaatgaaaagtgtcaagtaaaaatcctggtgtgattatcagaattttaacttgaaatatcacaggagatttttctcatcccaagtttttttgtttgtttgttaatttctggtactttacttttggtgtggagtaactaaccacttttgattccctggaaccttaagtgagtaggcagcagagctgatggtggagtagccaagctgagaaaggcctctggagggaagagcaaacccagtggggacagggtgggtttggagatctgccacatacagcttggaagtcttgggggcagagctgtcactgttacttgggaatttgtcttacctgggctcttggcagtcttgatcttcactggaatcctttccagtgggttttacaaacctggaagacactcttgtgagcacttgaacttgatctcccacagcacagttggagggccatgccgagggcggcccccagccttgctttccataaggagatgatggtttcacaatgtcttctgcatgacagggcctcctttgcctgccctgtaagcacagctgctctttgaagcttaccagtgagcatgggtcttaggctgttttcccaattattctcttttctttatttggcttaatttcaagattatctgcgaatagctccttttttctttttcgtctttgaatggatgctggcagtctaaccccattaaagtttaagtactgctctcatgttttttgtattaagcatttgaaggtgactgattttcagcctttggtatgttcaggctcatattcaatggttatcttcatttagagttttactatatccatgaatcctaatataactgctcaggtctgtgcaacataaccattatttacagtgccagtattctattgcagggttggcctagaaggtacatgttaatcctttcccatgatatcatgggagaaaagaaaggctggaaaagaatccagagactgtgacataatgggtaagaatggcctatggtgtcaggcaagtgtgggtttaaatctcattctgtcacatcccagctttgtgacattaaggaagttacttttcctctctgagcttcagttttatcacctgtgtaatggagatgataattgctat

SEQ ID NO: 425 - DNA, 32306 bp, Macaca fascicularis
  source 1..32306: mol_type = genomic DNA
ctcctcccgctccggctcctgctctttgcagccgccgccgccgccgcagcctccccctcggcgctgggggaacttttctactctctgtgacggtctcccccaccgcccccgggggcaagtcccgctggtccgcccgccccgcccgcgaccgtgctcccagcccgagcctctgcgcctcgggaagtttattccgcccgccctcctccccttcctcctcctcttcaccccgcctccccgccctcccccggctctttcccccgggtggctgccgctgccgccgctgccgctgccagcctgctcctcggccagccgtgccggccccagggctgggaagcccccggccccacgcaccgctccgctgcagccgccgcagccgccgctgctctgggccggccctcggtcccgggctgccggccccgcagagttccgggctccctcgccggctgcaccgccccgccccgccccgcgccgccccgcgccgcgccgacctgcagcgcccggctgccttgcactccgcctcccccggctcagcccccggccgcggcgggacccgaggtgagcgcaggtcgcctgccgcgcctgctggagccgggaggaccgagggaggaggtagcctagcgggagaagaggcagggatcgggggtggcagggtgggcgtctgcggtgcctccccctcgctttcattcctttctcccccaagcttgatccccactccgtgggggaagcagccgcggaacaaaactgtcttgctttgggcctgaactgctggtgggatatgagggggggggagggcagaggcgtggagcgggggtctcaggcttgcattggggtgtgtgtgcgtgcgtgtgtgcgtgtgtgtgtgttgtgaactccttcagggtgtgcgactctgacttttaaatcgatctggccgcggggccacggggctcaccttcctagcagagcttggtagagagtaaggagatagataggcgaatttcccccaccctcaaaatatccatctcttccaagaggaattttctgctggagagacagccaataaactctgctcaactccctccctccctcggttcttcctagctgcagtttcaaaaagcttcaaagccaggaatgtgggattcatcttccgatccccagaaggcaaatgtggttacagatgttgcacggtactttgccaagtttaaaacccttccttcaacactgtaaccaaaacagtgaggctagaacctcgggcgccctaagaagagatgtgggcctctggggccgctggattcagtaacttccgtcgggttctagactggctcggctctgtccagtttgtgccagatagtctcccaccccctccccacccctcctttcccctggagatttgaacgccgcttgcatggaagagaagctacttagagaagaaaacgttccacttagtaacataagaaaagtcttgattaaaaagttgtcatgaatttgacttttggggagaggcagcaaggtaacacaatggacttgtcaattttattgggcttttctttcttttttgagggatgtatgataagagttaggtgatgggcaaaggggccgttccatacgtgcttttacatatttttgaaaagaggcccatgaattgagacataacccagtggttttaaagaatcctgtcccagagatgcagattgctctgacagcccaagggaaggcggtggcaaaaaatagacaccacctcccttttccccaaaaaaattcttcctggaaaggtggtgttaagaaatttcagagatgggctgatccaagtggcgggccttaaatggaaacactatagtatgtcctggcacttgtctctggaggtgggttgctggccaggggcccaggcttgggcagccagcagacactagacttgtgctgacctcagacatcggcctctccatgcagctttgtagtgtgcagactgcttaagtttggaatatgggcctcatccatttcactgatggggacataggggtcagaaggttatcttatgcctggatgggacttcgatcacttattttatgattcatttgtttttattttctgtcttggaattttaaaaaatgggattcttttgaagctgaaatgtaggccttaagttgatgtaactgggtgttggataatagcacttctactattaccccttatgcgggtactcacaggtggtgaatgatgtatagataaatttcggataagtgacaaagactaaggattgccatgattatagattgggttcatgccctccctttccagctgtgttgttgagttttacttgaaatggagagggtgattttaaataaaacctgagttagatagtagtcttagaacttttgtaccttggaagagagtgatcatttgaatccaagcaagtttgttgttatctgtgaggaatttaaaggaatattaaggattcagagtaaagatgccatattcaggaatgtaatatattaatttcagaagtgaggaatttaatttgattaatagaattgtaatgaatttttttcaaagtagtgatttgccagattttctttatgtgtccaagaaaggtataacagagattgagtcaggatatagtggttatgcctctgtcttgccctagattgttctgaactagtcccgtgatggtcatggtaggcttctaggtaattctcaggcttggattgagtagtccagtcttctgagggagaggggcaggacagaaatggatctgaaaaatgatcctgctcttcaaggtcatgaggtgaagatggaatcagtgctgggactgggagctgtcatctgtggcttgttctgctcttggatccctgcatcttgatttatttttatgtgaagagatctcatgcccaactcagtaggaattctggagaagcaaaccactgatggtggcaaaactctttgatatgtttgggtggctttaatgacaggatagtttaggggtgctggatatgtgctaggcactgggctttacaggtgctttttcatgacatttccacaaataccatatgtcttattgttactttacctttctacaataagaaattgaagcttggcaaatttcggtggtagaatggggatttgaaccagaggtctgcaggacttcagaactcatgttcttggccacttttgccagtgattgtcaaacttcattcactcacatactatcttcctgagtttaccatggctgagtcctacttactctattaatattttcctttaaagcaacgattcacttaaagaaaagaacctaaagacatcattttttttaaagaggaaattgtgtattactactgtatttggaaagccaactcacttgttaggaataggaggtagtcataaatatgcgtttgtacttgcactgaaatcccaacttcagaataaagattttgtggagtgtgcgtatggtgcagggacctggaataaaaatggaggaggtaggtagatgatacagtattggtgatgttctggtttttggattgggtgatgggttcataggtgatgattttatttttagactttataacctacatacacgatacatttttttgtaaaatgataaagaaaattaagcacataactattaacataatgattatttagggaatattttactgcactatgctgactatagatttagcttggtgccttgtatgcagtaggtacacaagaactattggctgattgacaagaccccaggaaataattgtaaagcaagctcattgtttgttatatttgaataaggttgaggtatatacccctcctcccctattttctcctgcttctactctcctttccagtattgcaactaaatagcgtgggctgcagtgaggtttcacctggctgtagttatgggagacacagcctgggctgaagctagcacttttcagcatcaccttgtcttatatatctagcacttgggatggggcaaagaatgctgtcgtgaagtgttaagacactttcctttttacccagtagtaaggtgtgaccattcagagctggaagcagtatttaagttaaagcagggcctggatgaaatgttagcaacattaaactggtgaggctgggaaataaagccatcagaaattttaattggaatccgcagaatctcctgttttattttcccaagcaagcactgggcactgtggctttattcctggaaatgaggatttggaattgggtttcctggtacaaaatgccttctttgatcttttggagtgaaaactttgtgtttctttctgtggccaattccagttctcagaagaaccaaatggaagatttacctcctcatttttagcagttggccatggagtgttcttgcttgccacgtctctactaaaaatacaaaaaactagccgggcgtggtggcgggcgcctgtagtcccagctactcggaggctgaggcaggagaatggcgtgaacctgggaggcggagcttgcagtgagccgagatcgcgccactgcactccagcctgggtgacacagcgcgagactccgtctcaaaaaaaaaaaaaaaaaaaaaaaaaaaagaatcagaagttctaaactaggatttgtctgttggaaggacattcaaatgaaagactgctttcgaaagagcctcatcaatttggtgtggttggcacatcacagcctttggttcagatgggaggtagttttgcttgaactcacgctctcaaaattaactaataagagattcggcagcttccttttctgagttaacacacatacaccctctgcccctaatattcaaactgaccgcatatgcgaatactattcctgtgctcttctaggcagttctggaaatgtgagattgtttatatgtataaaggctcttatgtgatccgtcagctttgttttccagagccaatgctcttcagttgtttgatttttgggtttcactctctgaccaacattccactttgcccattagagttgcttcattgttgactctgggtatttggcctttatttctgtgactgggaaagtaactttaaatttcagtcttcctaaattttgtggaggcttgtgcagtaggtgaaggttgttttgaagaggggggatcccggtgagactacttttagcataagtgtcctgagggatcgcccaaggtcagttctcattcatcttgaggccaaaccctggctgttctggtctctccattgccccccactcccctcctttttaggggacccagattcttcaaggctcagagtaatcttactaagcaagactgctttctggatattgccgttttgcctttcgacagtctcctaggttttatcatccccatttcttattatgggacgtgattgatctctctgagggcaaagacttcaagttgttcattcctccattgattctttctgcacaagtcattgcccttcaccaatttaaaacctttcaaattatctccctgggctccttgaggcaagggactgttttattcatcttttgtgtaacttttgcacctaacacaatgcttggcctagaccacacggtcaataaatctttttgaattgccgagagaatgaagggatgattgcatattaagggagcaaagggacccagtcctctagggaatcagggaaatcggggacaagatgatactagtcactgtggtccgtaaggatgagtttggaaagtgggaacgaaagacattctatgtagaaggaactgcttttgatacctcttcttagtgcttaatgttataacctgtgcttagtcaattccacagacatttattgtgttcttttcagcatatgtttctttctttgtttttatatttaagggtgatgcttccatttttgggaagaatatctcactaattttttatatcctacagagcagggaatcctttattatttatagttaggacccaaacactcagtgaatcaattactttactcggactttttcctgttgcatatgtttccaaacagttgacagtgaaaatatagtggtgggcaatgcttgtgtgagaggtggaagaatgtaggtgacctctttggaaaatggatggaatccaaagtaaactcctcttctgagagattttaagggctgaaatcagtggacataccacaaataacttttcatcttcaatacttgatggctgtgtgtttttgcttatctatgaaagccaagattggctattaatatcaccatgccattgaaaagcaaggttgctctggtttgggggattcctttttagccagttatagaagaatattgataggccctccaaaaatataaccttgaactttagaaatgtacacaggggagaatgaaggtggggtgatagtggacaaagttggacgttagaagtgggatgatacttgggagtttggaaagtgggtactgaggaaaatatgcagtaagaagaacttgagcattctggaatagaaaggatgagttgaggtgatgttttaaaccaagttccgaaacttccactattgcagctattgatgagtgttgactacacttggagtgaaagtaagatgtgctcgatttactctctgtaagtagtgagttaatgtgtataagcaaacatgaccataaaggctggagcttagggaggaatatcccttgtcctgatgtcagggacttacacaagatagaaatatacgtacgagtgaaagtgtaggtagttatctagagtgacaccttccttttcacgataagggacacatgtgcccaatgctgtttttcatacagttttcatatgcttatcttgaacttgaagaacccgagttgttgtgaacaataagtggcaagaacaaatatcttatgaggatggcctagtaaaaaacaaaagctcggtcagcagagcttactttatataaacataaatgttctatttcagtatttttattttttttaattttttaaattttttttatttttatttttttttgagatggagtcttgctctgtcgcccaggctggagtgcagtggccggatctcagctcactgcaagctccgtctcccgggttcaggccattctcctgcctcagcctcccgagtagctgggactacaggcgcgcgccacctcgcccggctaattttttgtattttttagtagagacagggtttcaccgtgtcagccaggatggtctcgatctcctgacctcgtgatctgcccgtctcggcctcccaaagcgctgggattacaggcttgagccaccgcgcccggcctatttcagtatttttaaaacattttaacactcagcagtacattttatatcatgacctggtgcacacacaaacatacatgcatgtgcacgggtgttaaaaataaagccgaattacaagttctacaaaaaatattataatgctttttaattaatattcaatttttattttaaaaattctagtctttatatattaaactgattttacaacttgctaatgggtcctaataagcagtcagaaaaaaactattctaagtattgtggaaattagccttaatttgtttattgaatagttgctagtctggatgagacttttgtttttctttttgtgtggatttctgtcattttacagaaagttcatacccctatgctcctctcccttgctagattattttttctgtgtaagggtctttacttgtttccaaatcagattaaagtgagtaatatgtgatttggaccagctccagtgtgcatcatcatcatcatcatcttgatccccatcagcatcaaaggtgggactgattcatttagaatggtggcaggagccacttaactccctgtttatttagattatacttgaagaggttgttgacgttcaagaataaggagaagccgaggttacacacacccaaaggatgagagggaggtagggaagatgacccccatatattgttcagaaataaaaaatgaaagcaaatcgttagtaggtacagctctttgcattcaaagacacaagagcttaattgttgtccttgtccttatcattaaaatcttgctttcctcctccttcatcttttcccctcttctttgtcctttatttattgagcatttatcaggtcttcctgtaggtgaggctgggcatagaaagctcagttaatatcaagttaatattaaggttcacttgagtaagggagtgaataattacacgtctgactattagtggcagaactctgaatatcttggtcacaagttacagagggataaggatcaaccaacacctttaaggaggtggctgtttggcctctgaaagaggtaccagttggatgttattttgagaggtatctatacgtgtataggttgtagcataggcaacattccaaaaagagggaatgggacaagtaaatataagggggttgttttttatttagaggccaagttgtagaaaagatagttgcacatctttctttttttgaattggagtcttgcactgttgcctgggctggagtgcaatggcgcgatctcggctcactgcaacctccgcctcaggttcaagtgattcttctgccttagcctcctgagtagccaggattataggcacgtgccaccatgtccagcaattttttttttttttttcgtttttaggagagatagggtttcaccatgttggccaggctggtcttgaactcctgacctcatgattcacccaccttggcctcccaaagtgctgggattacaggcgtgagccactgtgcctggcagttgcacatatttttaatcactggtctcagactctgtgtcctgggatgtagcttctcagggtaacatgcaagaccttagacaactgaaaggaacagcacgttcacagttaaaagtgctttgtgatgtggcttgactctatagagcacatcaagatgagcaccataggagcaagcttagaaaaggagatttagaggcacattatggtttactttgaatgacaggctggaagttaagatatggcatgaaaacaggccttggtctagcctcttgcattatctcatttaatgctcactcatactccataaagtacctactctcttttttcttttcttttcttttttttttttgaggcggagtctcgctttgtcacccaggctggagtgcagttgcgtgatctcggctcacggcaagctccacatcccaggttcacaccatcctcctgcctcagcctcccgagtagctgggactacaggtgcccgccaccatgcccggctaattttttatatttttactagagacggggtttcactatgttagccaggatggtcttgatctcctgaccttgtgatccgcccacctcagcctcccaaagtgctgggattacaggcgtgagccactgcgcccagctaaagtacctactcttatgcctattttatagagggagaaactgaggcctagagaggtgatataaatgtctaaggttacacatctgaactttaactcagactgtaaattcctacatcaccatcagtgtgcaccagagcagaggttgaaaactggtggtctctgagctcagtatacctcagagttctgtcctgtttgagactgtatttaagacatttttaaaaaaacatagttactaacatgtaaaaatgggggacattttcatttaaaaaaaaatcaaaatgtccagctgctcctgcaacactgaaaactctggcagcgccagggccgtattccttcctacaagaaactgccagatcttcttttgaccgtgtctgtctgagggagacgtgtgtgctgtggctgctactgtctcagttcatcctgttttctcccagacgctgaggttcggtgttagttgctatttattgttcttgcactgacaggtttgtttgtttgtttgttttaaactcctcgcctacctggttcctgtaggccaactggattgaccctataggtgtatgagtttgaggccctggcacatagccttctgttagtcaaggatgattggtctagtggagtgggaagcccagaagctgagaatagatggaactagggtttaagccttgggctggagaagccatagggcttggtgaataaattacttttgcgatgagagggttgggcaaacatatgacttttggaacctggatgacggggagaatggtgttgctcttaaaagaaaatggaaggttgccaagaggacctggcttgggatggactgtggtgttgggtttgaggttctggtagagcgagaacccagaagaatgcttacatgagccctgtgagaagctgggactatggtactggaactctggagatgagggtttggggctttggctttgtattgactattgggtttgtactggtgattggtgagggatgagcatgccctgggggagagcttccttttggaaatgggaagaagtgggttgaggtctgaatgaaaaaatgaaccagctacaaacagttcaaagtctcatattgactttttggggtcaagtgccttatcttgcaaataaatcaactgtttatccgaatagaggagtaaaataacagtcttcaacttttgaacatgggaactggtaaaacctctgctcgtagaatcaaaggcagatacgctgtttgatgggtgacacctgtaacttatgtctgtgcctatttcactgagccttattaaggtaaaacgaattctaatagtgaccttttcttggtatcatagatgatacaaaatgtgaaaaagaagttgctggagccccaagatgggaaaaaaatgccagaggaaaatgctctgtgcttgagatttatccttgcttttaaccagtttagaatggaatgtccttttcaaattcagagaagcttttttttttttttctccttggcttgtttgcttaggattccctccaacttattgtttcttaatcagctatgtccacctcagctcctctgtcttctcctacttggttcccttttgatccctaaaggtcttattgttttaggacattctaagcacaagtagggtggatctgtctcagatgtgagtgttgtacatggaaatcttccaggagggcatttcttttgttctcttagagacttgtctccttttggggccatataactgtgacatttttagtttaattcaaattggtgtttttatttttcgttcctggttagctttattttattacatgtgcacagtaatatgagttcctatacattttttcctagaaataaaataattttattatgttgttttatttttgatactagtcatattatgacagtaatatgtgtgcacaatacaagatttgaagtacaggaagggtgtacagtaaaaccatttaattcagggactgtccatagatagagttcagtattacctgaggtttcaggcgttcactgggggtcttgaaacatatccccatgcctacaaaaatctatctatctatctatctatctatctatctatctatctatctatctatctatctatctttttcttttctttctttttttttttttgagatggattttccctctttttgctcaggctgcagtgcaatggtgcgatcttggctcactgcaacctccacctcccgggttcaagcgattctcctgcctcagcctcccgagtagctgggattacaggcatccgccaccatgccaggctaattttgtatttttaagcagagacagggtttcttcatgttggccaggctggtctggaactcctgacctcaggtgatctgcccgccttggcctcccaaagtgctgggattacaggtgtgagccactgcgccctgcctgcctgcctgtctgtctgtctgtctgtctatctatctatctatctatctatcaatcaatcaataatctatctcctgtgtttctggagataaataccaaggattggaattgctgaatcaagggatagttacattttaaatttcatggctgtgccatgaattgggtttttgctttgtatttgtgaagcaatgtggtgtggagatgaccctaagactcaaatgctcgtctgttctctggtgtaaaccaattgtgtggcccaagaaagtcgttttcttaacctttgtctttgtggtgctttcctttcctcatttgttaagaagggcacagacttagttatttctaaagtttagtaatttgttgattctctcagtctcactcttttttggtccttccaggaaatggagctttatgatttatttatttatttatttattttttattcctgtgtaagtatgagtctgtaaagaactctgggctttggaagccttgctaaccacagctttactttgattgttttaaagcactatgtctggtgtgtgctttacattaaaagcagagcttatatggctgattacctttttttttaaaaaaaaaatatggtgagtggtaagtaggcagttagtgaccaggaaactcatatagtcagctttttattattgatcaagagtggaggcaatggatttttagacttaaggaaaaagttttatttttataatagctgtaaaaaaaaaagcagtagggctatgatagacagtttttaagaaacagcaacattttatttatgactttggaacagaccagaagaggtagcttttgatcttttgaattgatcttttggatttgatcttttgagcttttgatattttgtaatgtgaaggtaaaataggaatttttggaaattttgagatatttagccagtattgtgtaaaaagatgattggatttcctggtgattatcaagctagatctatttaaaaactgaaacccaagtaaacaaaatttcatgggaattcggccaagcgcggtatccaagcgcggtgacaatgggtcactcctgtaatcacagcacttcgggaggccatggcaagaggattccttgagtgcaggagtttgaggttaacctgggcaacgtagtaaggctgtgtctctacaaaatttttttttaaaaattagtaaggtgtggtggcatgtacctgtatacagtcccagctacccaggaagctgaggtgggagaattgcttgagcagggaggccaaggccgcagtgagccatgattgtgctattgtatcccatacagcctgggtgacaaagacccctgtctcaaaaaaaattaatataaatttatgtttatttctcatactgcattttttctttagaatttgctcctgtaaggctggacacggtggttcacgcctgtaatcccagcactttgggaggccgaggcaggcagatcacgaggtcaggaaaaaaaaaaaaaaaagaatttgctcctacaacattaagcaatgtatttggattccaagttaaaagacttggaatttgggttgttaatataaatgcatttcttctggaaaatttttgagcccttagttactcattttaggaaaatcacttactaaatcaatctctctctgtctgtctctttttttttcttgagatggagtttcgttctgttgccaggctggagtgcagtggcatgatctcagcttactgcaacctccgtctcctgggttcaagcgattctcatgcctcagcctcctgagtagctgggataacaggcatgtgccaccacacccagctaatttttttatttttagtagagacagggttttgccatgttggccaggctggtctcgaactccttacgaccacaggtgatccaccagcctcggcctcccaaagtgctgggattacagacctgagctgctgtgccctgcctaaatctctttaagtatataaatgtattcaactaggtatagagtagcaaaaaaaaaaaaaaaaaaaaagaaagaaagaaagaaagaaagaaagaaacaattatttaactgttctacaggccaggcatggtggctcacgcctgtaatcccaaccctttgggaggcagaggaggccagatcacctgaggtcaggaattcaagaccaacctggccatcatggtgaaaccttgtcactactaaaaataaaaaaattagccaggcgtggtggcacacgcctgtaatcccagcaactcgggaggctgaggcaggagaatctcttgaacctgggaaacggaggttgcggtgagctgatatcatgccaccgcattccagcctgggcgacagagtaagactctgtatgaaaaaaaaaaaaaaaggtaaatgttctacagctgaggttaggtttacatatattcacagaagagaattttatgtaatcactaaaaacactatttttgatgaattttcagagacagatctcattttaaaggtagttaccttttcaaagaggcttttgttggctattccatctagtttgagccttaattattttccgtatcttacatatactaccttatatatattatcagtaaatacaaggtatgtctattttgtactctgtgtgtgtgtgtgtgtttattctctgcctactatactgtcttatgcataggaggcacacataacttgttgcaatgaatgaatgaccgtagagagtacccataatattgtagagagtacacataatattacgtgaaaaaagcaggacactaaaaacatagtataattcctttcatataaattatgtacagttccgtagtacagttccgtaaacataaacataaaacgtagtacactttcagatttgtagttaacatatatatatggatgtagagaaaaaaagatggtaggaaataatcctaaattttagctgttacctctgtgctgtgggtcatgcataattttgaagagacaatctttaaatacaaatgggtgaagtaaatattgaagattatgtcaccctgataatgtattttaccctttccacattaaaggtggtcaccttacctaaaatgatatattgcaataccgtggccttttctcttcttgagtaaaatgtactgtatctctgtagtgtgacaggttttatatctacttgaggattaaattatgatctaagagttgcacttttaagaaactggctttaatttcacatcagttgaagttaaagggtggtgaaagtatattagatctgctacaagtgtgtaattataattattgacacattttcaactcttaagtgtgatgcattgcccatgattttgacagctgtgactacattaaacctgctggaatactcttttcacaaagatttgtttaaacttagaattgtcagaaggattctccataaagtggatgaacacagatttagaggtgaaatggtggttcatttcccactgtgcctgttgatttttcgtctgttaaatgttaaacagaagattacctggatttagttttcatgtcaagaaacctgggaattttattttatttttatatagtataaaaaatgtgtgctgctattcctttgtgataggactctatgcagtgatagcgtagaatctcattctgtctccttctgaaggtccccaaccacataactccaaactgacagacttgatgttgcataacatccttattttctgaacgtctccttcaagaaagttcacatattatctccttttcatggccattctatccttctatatagatttattaagtcgctactgtgtgccaggcactgagaatatagacagaaaggctgtcagagagctcagcttggcagaggcagaaaaagaaatagccaacgtacagtagagtgaagcgccacattagagctctaaacgtaaaattgagatgtacagttctgtttgagggtactggaggtcatctcagggaacggatgttcttgagtatcttcaaggttaagtaggatgttatcaagtggggaaagggccttctaggcacagaggctttcagtagagacagcaacctttaaaactgaatatggctagaaccttgctactcagcaagtggtccttgagtcggcagtgatggcatcaatagaaataaagagtctcaggcttgcctgaaatcctgctggatcagaatcagctttgcaacagtatcccccagtgatctgaatgcttccaaaagtttgagaaacattggacttgagcataggaaggggtaaaagatgggagagcttggaaagtagaccacctgcaaaggagattggattttttttttttctagcaaaaagttgataatggagaagtgacattatcagatttatattttctaaagattgtctggaagtacatgtagagcagcatctgccaagaatgtttcttgaaaccttaattgtatataaggtgcttcaccaaaaaaggtcctcaaataagtttgaaaaatgcaggatattatattcttctctcagacaatataaagtatcatagtaaattgaaagttttgagaaattaactttgaagaaaaccattcacttaaccacttatcctggaatatccctagggtgttccacatttattccacagtggaactctttgtagcctcgcagctgttaataccctagggatggtggataacattctgctgaactcattttggaaactgctagcgctgcttcctaaacctcagacacttagccttatctgagtagggtaactgactgtccgcgtttagcggagatcctgggatgctagactttcgctgctaaactgggcaaactggggtggagttgggtacccttcctagcagtttaccacatatattactatttactttattttctttaggtaggctcagccttctttccttcaattcctgttttagtctcattttcatggactggtcccccaacttgtctgcattggaagcacctggggagtttccagacctgagcctgtgcccacctcgtgaggttgtgatttaattggtctggggtatgcattggcccttgggatatgagggagacttttcaaaaagtcctcaggttattcaaacgtcatgaaagtttgtccaaagccattatgcctgtggaaacgtagtcttgaaatgctacttaagaatttattttaatatataatacaaaaaatgaccattaaaaacaaacaaaaaaatagttgaagaatcacctagcagcatgtgaggcaaccaccagttgtacctgttccacactttgggaaacgcttaggggaataatcgaaatgtgggcaaaaattaaggggctggagcttatttggtgagtggtgtggctggaaacgatattgcagatttcagggctgtttgggagtctgagcccatgagatgtggtgactgatgtggtctgtaaggtggaatagagtaggaaaaggagaatctgataactgcaggcaacctgggggtacatgatgatcatgttactggaaaggggtcccaatccagaccccaagagagggttcttggactcacgcaagaaagaattggaggcgagtctataaagtgaagtctagtttattaagaaagtaaaggaagaatggcccttccgtaggcatagccccccaagggctgctggttgcccatttttatggttatttctgaattatttgcgaaacaaggggtggattattcttgtctgcccttttaagaccatatagggtaacttcctgacattgccgtggcatttgtaaactgtcattgtgctggtgggagcatagcagtgaggatgaccagaggtcactctcattgccgtcttggttttggtgggttttggctgggttctttactgcaaccggttttatcagtgaggtctttatgacctgcatcttgtgccgacctcctatttcatcctgtgacttagaatgcctgtctgggaatgcagcccagtaggtctcaggcttattttactcagcccctattcaagatggagttgctctgattcaaatgcctctgacaatcacataacagagcaggaaggtgtggggaatgcagcaaggtgacaggctctatttgagaggacttgggatgtccaagtagagctgtctggtgggttgtcagaagaaaaacagacggggcatgctggcttatgcttgtaattctagcacttttggaggctgaggcaggaggattgctttaggtcaggagtaggaaaccagcctgggcaacatagcaagaccctatctctatttaaagaattaaaaataggccaggtgcagtggctcaggcctgtaatcccagcactttgggaggctgaggctgggggatcacctgaggtcaggagttcaagaccagcctggccaacatggtgaaaccccgtctcgacaaaaattagcagggcataatggttatgtaatccataaccaatagtaatcccagctaccctggatgctgaggcaggagaatctcttgaacccgcaagatggaggttgcagtgagccgaggtcgcgccactgcactccagcttgggtgacagagcgagactgtgtctcaaaaaataaaaataaaattaaaaagaagaaaaacaattaatatttaatagcttagagaggagaaggctagatagagatgagagcctctacttcttggtacaggaggcagtaaagttcaaatggggatcagaaggtccctgagaaaggggagagggtggatctgtccccttggtccaagggatgagttcttggagaaggacgttgagagaggagtctgggaacagcctgagaggtaggaggaacacagaagagaggctcctatcatcatagagaggaagggaaggctcctcccaggtagccctgagaacccagtaagagaagaactcaggagcgtgttttgttggaagttagtcatcattagtagtgtttgtaagtttagcataaagaaggaaaccaacttttcgtgggttgagagggaggagaccactagatcaagtgacttttttttttttttaagtttttactgaagaaaaagcctggcatagtgtgggaccttagggaataagtatgggtttctttggggagtagtcatcttctggttactcatgaagttatgtcaacaaggaagaaaaaattacaagaaacattcacatattcacagaaaaagtgccagagttacctggggccccataaaatccgtttattttcaaatcataacctctcaccttttctccccatcttccctaaagtttgctctgttattctctagactcaacaatctcaatttctgaattgatattcttgtaaatgtcattaggatttcttacggtgctgataaggctgcttgtgattaagtgttcaacctttgtctatatgtggtgcacatttctggaaggctttgtagtttaccaaagcaacactgcattttacatgatcctcttaataaccttgtacaggaggcagggcagaaaatgatattattttattttacagggagaaaaaagcctttgaggtttaaatatattaaggagaacctgctaatgatgaatgatttagtgatggatccagggtgcaattctggtctctctggtacagtatttcttccttatggtggaggaggatgggggaagggtatcttctttttttttttttccaattagtttataatttccttgaggatggggaccatgtgttcattgttgagactgtgggtgttggggatgggtaggagagccctttggtccaagctttaccacacacaaggacttcacattgtcttgatattacctttgtatcacagaatcccataaatatccagaattgtgtattttctttttctttcttttttttctttgagtcagggtcttaccctgtcacccaggctggattgcagtggcacaatcatggctcactgcagcctcaacctcctgggctcaggtgatcctcccacttcagcctcctgaatagctgagactatagtgcgtaccaccacacctggctaatttttgtattttttttgtagaagcggggtttcaccgtgttgcccaggctggtcttgaactcctgggcttaagcaatccgcctgcctcagcctcccaaaatgctgggattacaggcataaaccactgtgcctggcccaggattctgtattttcaacaggattgaaagaaggtagcatggatcctataactttgaacttgcatctcagtattggaccatgtaattatcttgagaccagcccgatagtattgcttggcctgttttgtaaatatttaaaacatacacagtttttgtcatcctgtttttacatataaaaaacattttttgataccagaaatcatctatagtggaagtggcccaaacctctcgacttcaaagggacccttctctgtatgtgcatggaaggacctgaaaatgaaccagcccctgtaacaaagctcaagtccagtaaagatgatgttttgtaaccaccatagggctcaccacagacacttaataaatacttgttagtttgaattgagggaggtgttgttttgtgttaaacattctccacatttatcacaatggaccactgacaatttttaattttttgtaatgatctttcccatgagtcattaaagatacggcactaggatttggggaaggggaatgatgaaagagaatacagaaatggaattggcaagttttaggacaagagatgagaagttttgagtgagtgaatagttgaaagcgggaaggcattgctcaggggaaactggaaataggtggaggcacttttaagacggcagaccacggggatatgaggatgagacaggagtaatgcagagctgatatcttaagggggaaactgaaggctttttttcaactttaattatagccacaggataaaagcacattatagcactttttttctacctctactaagggctaggaggatataatctgtctcgtagagtcttgtcaaagaatctgcacttcagactacattgaaatgtatttctttttaagtttttggggtgtcgcaggttgaggaagtggaataaacatttgattccttgtgtttacattaaaatttcaagctactatttcatgatgaagcgaggaactttttagtcattgaagagatttaggcggatgagttaatgtttggtcatcagaaaatgtagcatgaggagcatgtttctcttgggaggagaaaaaagcaaaatatgagtcagacaaaaacatcaagtcatttcccgccactcgatgcagccacccttttgctgaaggaccatcgaccctgcaagtctaattcagacagtgatgaccactggcatttgaagcagacttcacagtttataaagctcttccccctgaaggccactcacagtgttgctgactctttgtataacattggcacttctgatgaggcgggcacaagtgagttattcttctggggaaggtgctttgatttaaaacctaaaaatgccatctgtaatctgaatgggacagagttttcctttgtgagggcccatcagttattcattgacaatgacatggactgtcacccagtctggagtgcagtggcgcgatcttggctcacaacctccactttctgggctaaagtgatcctcccatgtcagcctcctgaatagctgggaccacaggtgcaagccaccacatccggctaattttttttttgtgtgtgtgtatatatatatatatatatacactttttttttttttcttttttagagactaggtttcatcatgttgcccaggctggtctcaaactcctaagctcaaaaacgtctgtcctccttggtctcccaaagagctgagattacaggtgtgagccaccatgcctggccagttcgttggcatttttgaaaaatgctaaaaggcagtaaactagcctgtaacattgggagagtgtgaggtttgtcttagatacttattttatttttgagatggagtcttgctctgttgccaggctggagtgcagtggcgtgatcttggctcactgcaacctccgcctcctgggttcaagcggttctcctgcctcagcctcctgagtagttgggactacaggcatgcaccaccatgcccaactaatttttgtatttttagtggagatggggttttaccatgttgaccagaatggtctccattttctgaccttgtgatccacccacctgggcctcccaaagtgctgggattacagatgtgagccactgcacccagcctgaaaaagatacacgtttttttcattttggatttgccaatatgatggcagaacactgtcattgtcttcctgtatctctgttcttgatctttcagtgatttttttatgttgtgttccattttgctgggtatcaaattatcaccaagtctttgtgcaaatccagagaggtaactaactagaaatatgtgtgtggaagataggtatgaaatgttaggaaaaagaaaatgcttcttcctaactttttttttttttaaactcctttggggtctgattgattcatgcttttttatttgttgaaattttttgaatactaactatgtgctaggctctgtgttgattatgtgttggtgacactgagaccaaaggtgctattcctggcttcaagagaattcatggcttagtaaaaggaacacgtaaatcagtggttacagtacagcttggcaaatgcgggtgtgcacaatgtacagcagtgacccagagggggaaacctcacccgcgttggggagaaggatgtagggaagcttctgatcctggaaggtattacgtgagaagaataagtagaagttagcctggtaatgtagaggaagggcattttagcatagggaaacttcattgtaaagatagaaggcataagaagagcatagtacaagctgggaatgcaggtgttttagttgaactgcagcttagggtgcctgtgggaattgatgtgacataaggctggagaggtgggtaatggctatgtcatgaagactacttattgcttcctaaacaattcaggtcttatcctgaaatatgctagctaggattttaggcaggaaaaggatctgattagatttggattttggaacagttatgagcagcagctataagaatattctttttcaatggtgtctattcatctatgctttagactgaattgtgtccttcccagttcatgtgctaaagcccttaccctcagtgtgctcctatttggagatgaggtctttgggaggtgattaggtttaggtgaggtcatgaaggcgggaccttcctgatgggattagtgagcttgtaagaagagataccagagaacttgctgtctctttcctacacgagaacacagcaagaaggctgcccctctgttagctaggaagagggccctcactagaacctgaccatggcatcctgatcttggacttctagcctctagaactgtgggaaagtaaatttctgtttaagccatccgatctgtgatgttttattatggcagcctgagtagactaatacaatctatttattatttgggtaattgtgaaactaggaacaggaagaatattatagtaattcaagtaagtagcaataatttggctactgtcttttgttttaaaaatatttgggcacggaacaaatcattataactgaacttctagttttgagatcttatggttaggatattactagctataataagttttatgagagaaccttctcccttgaacatctccacatcctaccttttattaaagtaatccactgattcccttcactatagaggctttgggtcttttcattgtcttccggtcagcaggttggtacagctgaactctcagtacctagtgcctgagtgttgaatcagttagccctctgctttatctaattttgatactatgacatttatagtgttttaaaggaatcttctgtatatggttttaggagttctgtgggaattaataccatttagaggatcatgtaactatggcagatgatgtttgtgatgaaattggtacctatcttgtgtatgtttgaataactatttaaaagagaatatttttcatagttttgtttttatgtctgaagatctgtcttaaacattttatcccgtacttaacttgtatccgatatttgagtctagtttccctttcttttcccaaggtcttgctcttttttttttttgagacaggctctcgctctatcatccaggctgtagtacagtggcatgacctctgtttactgcagtctccacctccctagttcaagcaattctcccatctcagcctccctgtaaccgggaccacagccatgtaccaccacgcccagctaatttttgtatttcttatagagatggggttttgccatgttgcccaggctggtctggaatttctgagctcacgcgatccacccgccttggcctcccaaagtgctgggattacaggtatgagccactgtacctggcctattctttattttttaaactctgtcctttctccccaattctctctaatttgtcctctttattggccttttctcttgagtttagaaataggcttaagtattctgttctttaaaaaaaaaaggtgttttgacgcctatacctctcataagccccttcctgaggaagcattttaaaaaacgaatccacattcaatgctattgcctcttcagcctgtagtcttcttcagaacataataatcttacgttgctcccattcattcaatgttttggaagtgcctaccaaacgccaggactggggtgtgtatgtgtatctttgtttccctcccaggaggcctctttttagtggtagggtcacaagattgggaggagttatttagcccatctctccagtgcctgcatttgctctgcattataccctctgagtgaatcctcagccttcactgaaattctacaaagttaggggatgcagtatttactaggagcccactctgcctttggactaatctgactgccagagggttttttgatctataatgaattttgcttctatttatcctttgatcacagttcttttcagctatacagaatatagagtataatagtatttttacatgatttgagctgtcatatttacccccaatatcttttttctaagaatgtcttcatagcttccatgggtcttcaccatcctgcctgccttgttgcttatacttctgtttgattgagtctttaagaattggtgtctagaactgattgtaatattcctgactgggttttctctcctctgattttttgacttccatgcttgtattatgcagcccaagctgctatatttcagatggccacatggttctacttggagagttgatcaccaacggaaatctcagtttttttccatagatgatactgccaggtcctgtcttcctcagcctctccttgtctgcttatacccttgtcttttattccctttactgcgtgtgggatcttaaatttaccttaagttaactttcagtttgctaggtcctgcccatagcagtttgcattggattccatttctgttattttagggaagatgtgagtttttctgaaatagtaccctttgaatgtagtaacttaacagatctatctgatctgttaagatagatctgttaagttaagatggatctgttaagatggatctgttaagttaacagatctactaagttaacttttctttttatttttggagacacagtcttactctgttgcccaggctggagtgcagtggtacgatctcgactcactacaacctccgcctcccaggttccagcaattctcgtgtttcagcctcctgagtagctgggattatagacatgcaccaccacagccagctaacttttgtatttttagtagagacggggtttcaccacgttggccaggctggtctcaaacccttgacctcaagtgatctgcctgccttggcctcccaaagtgctaggattacaggtgtgagccaccgcccgtggccaagtaaactttttctttttctttatcttttaactttttacttatcttgatcacaaatatttcataagacatgttgtcaagtctagatgtgtatgttcccttgaactgccagcttaggaatcttaacgagaaaaggaaactgggttaatcttgtatgatttgttcttactattagggttcgcagggattactactttctaagtgtttaaaatccattctcaagtattgcctgggacttgttctgagtgtctgtagtctgttggcatttttccctctttttttttgagaccaagtcttgttctatcgcccgggctggagtatagtggcatgatctcagctcactgcaacctccacctcccaggtttgaatgattctcctgcctcagcctcccgagtagttgagactacaggtgtgccccaccacacctagctaagttttgtatttttaatagagatagggttttgccatattggccaggctagtcttgaactccagacctcaagtgatccgcctacctcggcctcctaaagtgctgggattgcaggcatgagccaccacacccggccttctcattttaatttttctaaagtgtcttctgaagcatcttgttcctttctgacttcattctttgctgacctcttttccccaagttttggaattctctgagattgcttttcctctctctttcaatctgtgtcttttaagattctctatgcttgcattgtccagtaaggtagctactagccacagtcaacatagaaatgttactggctttaaagaatctactgatttcaagttgaaagccagaacaggaaacgctgacacctgggtagaaggttaaggttgactattccaggaatcgagagaggagcacgaaagtggccacagtttaactagttatacttgcatgttggctgttgccaggttatctgtataggttcctgacccctgtctcctgctaacaataagtcattattgcaaataaagtaaatattaataaatatatgtgtagagtatttttaataaaagcctatgtgtagtgtgccaaaagataatgagctttggaaacaaagtaagttcttaaattggcagtttctacacctgattctgtatagtactgctaaacttgctaggttattcaaatactatataataatgtttgtaggcatttcctagtgtttggatattttctgtaagctacagttttgatatatactactgtacttcacattttttattaagcagtttaaaaagatgtttataatagtgaataaacagtattggaagtatttgaaaaataatttatgatttcagaaattacagttttttcccccaaattttgaatattgatattgatagagagtttgaaacaatagtacatagtgcttgtccaaagaactatttatttcttttgataatatgataggtacagaaattgagatagtgtttagagattgttatggtaatttgatattgccatcagtacttgtgatcagtggattcaacccaccgaacaaggagttttacaaaagtattggtccattacagatggtaattttgttgtataagtactggtctaggtgagaggtagtgatttcttgaaccagacttggaagtatgagaagagattggttggaatcaggatatactttgaagatagagccagtgggatttgctactagattagatgacagattattctagattatctttccctctaaactgcttcaatttataaaatgggtgtagttatgacagcaacactcatttttgttgtagctgtgtcagatgtttctttgagcttgctggaaatcccttatgttcattactgctaatatcatctttctaatccaatcatgtaattcccttgactttcaaccatcaactgctcaccattatagataaaaaaaaatattaaactgcttaggttgacttttaagatatgaggtgcatcttctttcagactgttttccatatcctctgttgctcctgacaatagcccaactagactgcctgctggtccagtcaatctctttctgcgtaataaactacctcaaacttgatggcataaaacgacaaccattttattgtgctcacagtttagtgagtcagggatttggaacatgcacagcaaggacagcttgtctctgttccacaatgtctggggcctcagctgggaattcttgaaggttgggggctggaatcatccaaaggctcattcactcgcatgtctggcggttgatgctggctgttggctgggagctcagctggggctgtcagctgaaacacctacatgtggtctctctgcatgggctattttgagcttcctcagagcatggcggctgggttccaagagcaagtgtctcaaaagacaggaagtggaagcttccagtttcttaagatctggttctggaagctgttacagtgtcacttccaccatattctgttggtcaagctgtcacagagccccattaaagaggaggagatacagatcccacctcttgatgggaagagagccaaagaatttgagggccattttaaaaaaatcaaatggggtggtgggggggtattttaaaatggccacatcctactatttaccagtcttctctgtctttctgagtctctgtcagctgctccctgtctccactcctcaccccctccccagttcaaactccatctctttctccatgcagtctttgtcatgtctcatcctctggctaaaatcagtttttctctcttctgtgttcccatagcattactgtttgtaattcttctgtggtaatttttcagtgtttttctttcttggtagattataaactctttgaaggtaagaaccatgtcttgcttacctttgcatatctcatagcaggtaagttttttgaatggaactttcaatatcaaactgagtctcacatctgacacccagatgggttgggacttaacagtggttaaacagaaaatataatgagaaaatttaaaacattccttaaaaacatcgtttctggtgttgtattttaagacttttgaaatgaactctctgttgtgagtaaaacttctaatttttttcttctttggccataaaattaaaagagattaactttttttctgatattatcaacatcttcctgctcaggtcaatctctgataggcatgccctagtgtttttttggtgaactttagatctcagtccattactggatcagtttagggagtcacacccaagactagaaatgaaaggaaattgaagttttgaataaagcttatgaattgcaagggtaagaattgttttatgaaatttttgtttcagttttatatgcatgtgtataataagttcaaatataaaataagtattaaaaatctttgaaagatactctcttatgcagcctcattctaaactgttgatgtcctagttcatttctttggctttttcttttttagcttatttcttctggtgtcctttctgagggcttatatatgtacatattgattctggggaccatacacacatgttctattaatctttacctatctagcctctttttataataaacctcagtttcccagaatgacatatgttgctttttctcttctgctttggagactttacacctactctcctgccctcaagaggccaggaggtggaattagcttattattttcttttttcttttatgtttttattgaagtatagaatccatacagtgaagtgtacaaatctacagtatacaactcaataaatttttgcatctgtatttacccctataagtatcactgcagatgaagatgtagaaacagtttcatcaatccagaaggggtcagtttattcttaaattatttctggaacaaggtggtggtgtggtggtgtgagtaaattagtagattctctctgatttcttcatatggcatatgtaggttataatgtttagtttagaagatcgcaaaggtctgaagcaactgagttagaaagtgttaaaacagggaaatgggatgttgaatgtgagctttggcagaattaaatgggacgagcttgagtgaaacaaggggaaaagcaaagaggagtcatatcacgaagaattcaggagaagcaaggtttatttgaatttcagaagggaaaacataaaacttagtttgccattgctgctgtaacaaatcatgacaaatttagtatcttgaaacagcacaaatttactttcttccagttttggaggctctcgggagaatccacttcctttggcttgtggctcttcctccatcttcaaagcaccttctttccgtctctgtttccatcgtcacactgccttctcctctctgaagttaaatctccatgtctgtttcttaaaaggacacttgtgattatatttagggcctacccggataatccaggataatcgccgcatctcaaaactcttaatttaatcacatctgcaaagtccctttgtcacataaggtaacattcacaggttctggggattagggcatggatacttggttttggttttcaaggatctttattcataaagggaaggtctgctatatatttcctgctagttcattctcctttttaatgctagattaatttttctaaaacagcaccttgtacattttacttctttgctcaaacatctttggtgacttcccattggctgatacaattattagggcctagattgacattcacgtggctatttaaccccaagtcacatttcaggtttttctcctcctctttcatcatggatgcagcagcatgcattttctcattgttgcccccatgattggcttgtctttgcttgctgtgactcttcctcctgcctgtggggcccttaccctcccttcaaggccttctcagcagcattcccctaaccatctgtattagcttcctagggctgccgtaagaaattaccacaaacaacagcaatgtatcttgcaaagctgtggaggcccgaggtctgaaatcagggtgccggtagagccatgctctaactgatggctttagaggagactctttcctagctcctttcagcttctggtatctccaggtgtttcctggcttgtggcagcatgactgcaatgtgtgcctccatcttcacatgaccttctctctgtgcctctccatgcgtctgtcataaagatgcttgtcatcgaatttaagtaccacctacagaatccaggatgatctcatctcaagattcttaagttttttacatttgtaaagacccttttcccaaataaggtcacactcacaggttccaaggttagaacgcagacaaattgtttggcaggataccgttcaacccactacactacctcagtcagcagtcataacttatttctgtgacctcttgacatgactggcatgcctacacaacttattgggaacccatcatctctatcttactatttttggataattctcacctctttcactaaaccataagtgcttgtcttagtccatttgtgctgctataactaaatcccttagtctgggtaatttataaataatagacacttattgcttacagttctgaaggctccaagatcaaggcgtgggcaggatttggtgtctggtgagggctcactctgcttcaaagatggtactttcttgctatgttctcatatggtggaaggggggcccagggagctctattttttataaaagcacgaatctccctaaagacttaatcacccaccaaaggctccctgcctcttaatggtatctcattgggtattaggttccaatgtatgaattcttgcgggggcaccaaccttcagaccacagcagcccttgaggtcaaaagggtttcttttgctctgaaaccctcagttcctagcagggtgcttagctctgtagtgcttcagaagcagcatctatcagatgatcaactgttttttttcctttttttaataaaatgaaaggtgtcaagtaaaaatcctggtgtgattatcagaattttattttgaaatatcacaggtgatttttctcatcgcaagtttcttttttgtttgtttgttaatttctggtactttacttttggtgtagagtaaccgcttttgattgtctggaaccttaagtgagtagggagcagagctgatgttggagtagccaagctgagaaaggcctctgcggggaagtgcaaacccagtggggacagagtgggtttggagatcggccagatacagcttggaaggcttgggggccgagctgtcactgttacttgggaatttgtcttacctgggtgggctcttggaagtcttgatcctcactggaatcctttccagtgggttctacaaacctggaagacactcttgtgagcacttgaacttgatctcccacagcacaattggagggccatgccgagggcggcccccagccttgttttccataaggagatgatggtttcacaatgtcttctgcatgacagggcctcctttgcctgccctgtaagcacagctgctctttgaagcttaccagtgagcatggttcttaggctgttttcccaattattctcttttctttatttggcttaatttcaagattatctgcgaatagctccttttttcttttttgtctttgaatggatgctggcagtctaaccccattaaagtttaagtagtgctctcatgttttttgtattaagcatttgaaggtgactgattttcagcctttggtatgttcaggctaatattcaatggttat

SEQ ID NO: 426 - DNA, 32306 bp, Rattus norvegicus
  source 1..32306: mol_type = genomic DNA
cgcggagttccgggctccacgccggctgcagcgccccgccccgccccgcgcctcccgcgccgccctgcagctcccggccgcctcgcgctctccgcctccccgggttcagcacccggccgccgctggaccagaggtgagggcaggtcgccgaccgctccggctgagccgaggaccgagggaggagggagcctagctggaggcgaggccgggatcggaggtggagggtgggcgtctcggtgcctccccctcgctttcattctttctccggcaagctgcatgccctctcgacgttgggggaagccacggcggagcgaaaccgtcttgcttagggcctctgctgccggtgggatccggggagggcagaggcttggagtagggggttcgggtgtgcgtagggtgaactcctgcagggtgtgcgcctcggacttataaatcgatctggcctcacggccccgggctcaccttccaagctgagcttggcagactaaagagattggccagtcacccccacccacaaaatatccatcccttccaagaggaattttctgctggagagacagccaataaactctgttcaactccctccctccctctgtccttcctagctgcagtttcaaaaagcttcaaagccaggaatgtgggattcatcttccgatccccagaaggcagatgtggttacagatgttgcacagtactttgccaagtttaaaacccttccttcaacactaaccaaaacagcgaggctagaaccttaggcgctctgggggagaattgtgggcctgtggggccactgcgtgcatggacttctgtctggttcagagactggcttggctctgtccagtttgtgccagatatatctcccacccttcccgacctccctcttcccctggagctctgaacgccccttgcccggcagaagagctatggaggaagctacttgggaaagaaaacacccattttgttgcagaagaaaagtgttggttaaaaagttgtcattaatttggtgtttggagagaggcggacggtaatgcattggatctgctccctttattggcttttcttctttgcggtttgtgtgattggtgtgagatgatgggaaacatctctggtcccatacatgtttaatgtgattgcatatatatgtttttatgtttgcatagatatataatttctgggaaaaaaatccctcaaatagaaacataacccagtggttttaaagactcctgttcctgagaggcagaccgctctgacagcccaagggaaggcggtggcaaaaaatagacaccacctcccttttccccaaaaaattcttcctggaaaggtggtgttaagaaacttcagagatgggctcatccaagtggcaggccttaaatggaaacactatagtatgtcctggcactagtctcggaggtgggttgctggccaagggcccaggcttgggcaggcggcagacactagacttgtgctgacctcagacactgccttaccatgcagttctacagttggcacactgcttaagtatgaaacccaggcctcacccatgtctctcctggggaccgtgcggtcacaaggttattttaagtctgcatgggatctggattaccatcctaagatcaaatccctcctgtcgtgatttggttacttttgttttctgtcctggggttgatggacggaaatgttcccaagctgtgcctcttgccttgggttgctgtcactttgtaatgggacgcagcatccctgctgccactgtacatgggactcctcaaaggtgatgagcgaggctgagatagaccttagctagaccgcagagagcaacggccagcatgggcatgcgctggattcttggtccctcttcaactgtgtggctgaagtctgcttcaagcagagagtggttttagatcaaacttgattgagataatagtcttacaacttttgcacgttggactggagcgatcacttgaatctgaataaatttcttgtaattgctaagtaattacagagaatattaaggatgcagagttaaaatgccatattcaggagtgtaatgcgtttcgggagtgaggaggaacttaatttgattaatagcattgtaatgagtgccctcccctccagactgataatttaccaagttttcttcctgcattcatggaatgggtgacagtcactgagattgaaataggcggcatcttacccgagcttcgtgtcttctcaaggttggactgtgttgattacactaggcagcagggtgtttcttaaggtcggatggagtagtctgcagagacactggacagaaatggatttgaaagatgatcttgctctccaaggtcacaaggtaatgaaggagtcaatgctaggacctgaccgcccctctgtggcttgcttggccatttggatctttctattgtgattcatttcgtctgatcaaatctcgtgtctggcttattgggaccattatggagaaataaggccctagtgggggccaaagcctttgacttgttcaggtagagttaagggcagggtggttagaggcaccgagtatgaggcaagcagtgtgcccagctctgtgcaagcattttgcacaccttagcactccttctccagtgggaaactgaggcagatttaggttgtggagttaggatctgacttaggattcggtgcagctcagaacacatgtcccgggccgttgttgacaatgactgccgaggtttttggctgcagctaagactcactgatctttaattatctaatactgtgtctcttttgttttagatttacttatttttattttatgtttatgggtgtttttgcctgaatgtgtgactgtgtaccacatgcagtgcctgtgaagcccagaagagggtgtcgggtcccctggaactggagttacagacccttgctagctgctgtgtagatgctgggaatcgaaccccgggttctttggaagagcagccagtgctcttacgtgctcagccgtttctccggccccctttaatatttttcttttttaaaaagcagcaaatagttttttttttaaattaaaagactagcaataacttaccaacaccatcttttaagaagcaatgtgttgctgctgtattgagaagccagctcaacggttaggaaacaggggaattgtaaagacagactcctacttacttattttgaaccctcaagtggaggatagtgatgacctggaatgtgtgtgctgcagggatctggggtaaggacaaagcaggtcacactattggtgacatcgttgttttgattaggtgtcaagttcatgggtgctgattttagtttagctacatacatgacacagttttttttttttcagtgaaatggtgaaggaaattagacatgataattagcataatgactacttggggggatatttcattgcactttgctgactgtagcccatagccttctgccttgcatgaaggagacacctttactattggctgattgacaaaactgcaggtgatcatcactttagagctggtggttacacagcgtaaggttgagatagtgcgtcttctctgttttctcttccttacgtcctcgtttccaatatcagggtgtagggacagcttgggcttttccgggatttctcctgagaggcacgggctgggctacggctgactcttgagtgtctttttgttttgtctatctggtccctgggatggggcccagaatgcggtcatacagggttttcagtgcgtctgtgtctttaacccagtggtaaagggatggttcaggactggggatgctgttgttagggcagtgcctgggtaaagtgttaacgatatgaaagctggaggctgaggttttaattggaacccactgtcctgggttattttcccaagcaagttttgggcactgtggctttattcctggaaatgagggtttggaatttggtttcctgctacaaaatgccttctttgatcttttggaacgaaaacttggtctttccccagccccaccctgctgtggccagttctagttcagaagatccaaaggggatattgacctctttaagagagagagagagagagagagagagagagagagagagagagagagagagagagagagatcaactatgagtgatagaaaagccaggatttttctgttgcaaaggacagtctaatgaagaccctgctggaaagagggttacgtacgaagttggtatggctggtgcatcctggcttttagttgaggtggaaggtggttttgctacctcaaattaactaataagagacccatacgatgggggagtctgaggatgtagctgagtggctcacgtcccagcataactgctactagaatatgggggcagggagaagaaaattcagctttcttgattaaaaagaaagagcacgtccacccgcctgatattcagaaccactaggcttgggaatctaaacttgtttgtgagtatcttcccagatcctgagagatctgtttgccaaagtttccactgcttcattgtttgactttggggtttctcggtctctgaccagcattctgctttgcccattagggttgcttcactgtttactctggctgtttggcctttatttcagagacagggaaaggtatttgagattgcagtctttctaagttctctggagatacatgtggtagctgaaggttgtttgggaagtgggggatagggtaagtggtcatagcgaaggtgtcctgatggatctcagaggctagaacttgacccaccctaaggcctgactttgactgctctagccctctcctgacttttcttctgggaagggcagactcctcaggggtcagaataatcttgtcacaagggagaaagcatcttgcttttctcggcattatgatcttgtagcattgtgtcatctacatttctcctcttgggcctggattcatctctttaccataaaggaccaagcgtcattcatttttcctaattgtgttccttccatgtgattcatcccccttcactgacttcaacttgtcagttgtctcacggccgccttgagggcaaggactatccacgtcttacttactcaccttttgagtatcttgtagatctaacccaatgccgaaccgtacaaccagtacattttttttgataaattttaaagaacattcatcttaactttatttatgaatttgtgcgtttgtgtctgcctgtgattatgtgcacaagagtgaaggtgcctcggaaggccagcagagggcgtcagatcctccagagctgaggtcacaggaggttgcgggctggtgatgtggatgctgggaaccaaacttgggtcctgtggaagagcactgttacctgctgagccgtctctccaacactagtgaatatttttaatcctgagagaacgagtggatgactgcgtgttatgggggtaaagctatcctgtcatttaagaagagggaacagcacaagaaagatgacaaactttatacccggtctctaggaatggatggcaaactggtggaagatacttcaggtgaggaaactctctagtacacctgtcttccatttttttctctgtgctgataactgaagccagagcctcactcctgacaatgtgcttgcccattgattgtactgtagcttgtatttagtaaatgcagcaaatatttattgcattctttcctgcatacatttcctttctctttgggagaaggtcaaggagacatgtctattctggggaagaatatttcaatccattttttttttcttttttgtttccgtcacagcaagggatcctgtgttaccgtgagactcagacacttggtcaatggagccgattactctgattttctcttgcttcaagagtgccttcttaaggaattgaggttgagaacagagtggtggccagggcttgtggcagaggtgaaagagtgtgttccatcgctttgaaaaaatggataaaagtcaaagcaaactcccccctttaccgggttttaagggctggattggagtggacataaccactgagcagtttggtgacctgtgaaagccaatctcgaccattcagtgcgcatggctgccattgacaggcaagattgctcttggctctgcctctgctttggaaggcagacttaactgatggaactgctgaaaacaccaacagaataaaggactgtgaggggctcgatgctgggcaggctgggatgctatttggagtgtgcattccgtgggtgaaaagaaggtgaggggaagcttttggggatggagggatagctgagatgatgttgcaggcgggttctgcatggtgttcaccgcggctcttcttggtgaagctgtaatcgagtcgactaatgtcctaggttaatgatgcttgtaagtgggcaccactaacattgctggagcccttggatgtgtgtctctttcctggattttagggacttggacgagatggctatacctaggaatagcaagcagggagaaacgacaggtggctctccagagtgactcttaccttctcttcctaagagaaaattggcgagggacaagtggactcaatgatggtcttcttgtggtttttgaaggcgaggattctgagccgttgtgggcaagggggttgctggagagatgtgtgatccagagagaaacggagaggctcgttctggagataggacatcaggtaaacataaatgttcagtgtcagtgttttcaaaaagattcttgtctcccagagacattttccattatggtctggtaacacacacacacacacacacacacacacacacacacacacacacacacacaaacacatatgcatattagaagggaagtggaattacaggtttcgatagactatattgtaatgctttctaatttctattcaatttttattaaaaaattctgatctctactaaattgatttcaaaacttgctaaagggtcctaatcagcagttggggggggggaagtgttctattccaggtattgtgaaaattagccacaatttgtttattgaatagttgctaatctgaatgagtgttttctcaggttttgggggggggtggagggcatgggttttagtcattctacagaaagcctcaacctttctccttctcccccacccaaagcctttgcttttcctcaaatcagattaaaagggctaacggggaccttgttgagcccccataggcatcgaaggtgaggctgattaatttaaactgtgcaggagacctgggctccctgtttacggagatcatattcgagcaagacggttgccatcagttgaagaggcaagcaagagtacctacctgcctacactggaaaggtggggacgaagtttggacgatgacaccatgtgttatttgaaagtaaatagtgagagcctggtgggggattggtgctggtgtaagccgttcacctgccgtcactgtccctaggagtgaaatgctccccgttcttgcttttttgcctcttgctttattgatcgttcatcaggtcttcctgtacttgggctgaacgtgaaagtcagaagtcagtaaaaccagacgtgaagttatcctcgaaggggatgacacctccacaagaagaagaagcagacagagcgttaaggatcttggtcataaggtctagagagataagatcaacccaacacctttgaggaggtggctgtttggctagcctaggagagcggtgccattttgatgttatcgtacggcaggtgcttttaggtgcgtctttgtgaaagggggaagcatagcaaatggggctagtaaataggtcgtaggtcttctgtaggaaccaggatgtatacagtgtcaactggacacagtttcaatcattcgatcagattttacatcttgagatgccgtatctcaggagaacatccaagacctgggaaaacaaggaaggtgcagtcccggtaatgtatcttggcggtatggagtatatgagggggaaaaaaaatcagaaaaagaagtaagatgggctggtgtggtaccttgtcatggcttcctgggacacctgttgaaggctaagataatgcctagaaagcaggccattgatgggctgtggatatggtagcatcgatagttgttgtctaacgtgtaaagctttatttttagcattgcttaagccaggtgtgctggtccacacttgtaattccagcacttgagagatagagggagggggaccagcagttcagagcagtaatcctcaattacacagggagtttgatggtggccctaggatacgtgagaccctgtctcaagaagctagaagggaatcttgccttgagcaagccatacctgtgtcccctcatttaatattcatatccacttgaagtaccttctcctgtcagccccactgtgtaggagagactgaaacgcatgggatagcttggcaggcttgaggttacacatctgggcttgaacccaggccatcaaaatcaccatgttcttctgtaaaggtagaagtgaagacgggttcccaggctagtgtgcctcagagttttgctctggcttgatgatgtatttaaaacatttcgtaaaagtttgccattattgaaaatgaggccctttcccattagaacagatactggcaatactgacaacaccatgcatggccctcttcctggaagaagctgtgtggatcacttgtgattgtctgagggaagacgggtgttgagttcacctctgtctctcccagacaccaacatccgctgatagttactcattataccttactcttgggctggcttttaggatctccctagccttccttgacctcctacacactattgctctggtccttagcaagcttgagacctgcactccttaggcccctgggttatttgtttagtagtgtgggtttgttttccagaagccaggaggaaacaattcatactagggttttgatttggggctggagacagagtttattgactaaattctttccgatgaggaggatggggtatgagtaactgtatctgccctgtggaaccttggtggctggggtagtggtgttgatcttaaaagacgatgtaaacttggcaagaggagcatgctgggatgggatgaggagctggctgaggagcaaggatgtggtagaggttttccttcagtccttcgagaggttgggggcggggatagcacaagagtcctggttcagtgctttggcttttattctggtgggattcctgcttggtgagaggatgaatgtggaggtggtccctttcgggaataggagaagggatctgaggtgtccatgacataatgaacccgaggcaaagagtccagagtctcttattgactttttgggggtcaagtgtcatgcctcccaggtgaattaaatgtttattctaatgaaggagtaaactcgacagttccccacgtttctacctgggaactgataagcatctcatcacagactcagaggcaggtgcagactctgatgaatggcacctgtcacttacactcgtgccctccttgagcgagtctggtactgtgactttcacgctttgattcttaaacatttacttatcccaggtcagaggagagaaggctattgagccccaggatggagagaagtacccaaaggataatgtctctcagctgaggttttattccggcttctacctggctaagaagggaatgccctttgacaaattcagagtaatccttatctccacctccactccgcttgcgtcagattccatccagcttacagtttcttcgttatctgggtccgcctcagcatcccagtcttctcccacctgcttgcctttggatcttcgctcgtcaggcgagttggggcggcttgctcagatgcggaaaccttccaggaatgggtctattttgttttcgtgacacttgaccatacggctccgactttaaaataattaaagttaacctttttatttttaatttactatatatataaaatacatattataaatacattcaatataacgatatacaatatgtataagtatatatgtgtatctgtaaatatgtaatacatattataataaaatgtatctttatttcctgtgagcgccttgataatcgtgtctacacaggtgttaacttgggtttgcttgatacttacatttttggtagtttatgttgtgaaaggaatacaggtacatgattcaacatacaaaggaagagagcacacagtagaaagcagcttttacatttccaccttcagtttcccccttagtaaaggaaaaacatcaacagtcagaggaattactgcaggcgactgcacctcaatgtgggagtgttcacccagcacagagaggaccccagtttcactccccagcatcaaaaaaagagaaaaaaatgtccaagttcgaggggcctagctcaaaagctgttgcgtgtatatgcgatatgttcttcttgctggactgccttgtctggccccagtaggagaggaagcacctagcttcacaggcttgaagtttgggggagggaggatggggagaagggggtgtgggggggggatacccagtagagctctcacccacttggaggggatggtggggaaggatggtgggagggagtgacccagagtggggcagtggatgggatgtaaagtgaatatgtaaaaagtaaatacagaaaaagaaaaaaagagggagaaatccaacttgtttgttctctcagcgataacatttaattacatttacagtcatatggtggcttgtttgttggagatggagtcttgccatggctcccaggctggactggagttctttctttcggcttcagtagtcattctgcctcagcctcccaggtagtgggaacttcaggcgtacaccacagttctgagggcgaatatgtgtttgtttctaggtgcgtttgtttcttatacaggtttcagtgctgcacctttttgtttttaagcttaacacgtcttggaaaattccctctgtcagtgtggacagagtagcctcttatttatttccatagcttttggctttcagtactgagggttgaacccgggcctttacacatcctgagtgtgctaggtgagcgtgtctctgcactcccaactcctgcccagcctcctgccttagaaggcctttcattgtgtactataatttatgtgatcattatttcagattttgctttagacaacatgctgcattgttgtgcaccactgcagtgactgaatagagcatgcagaactgcagtgactgtttataggtgcatggtggcattggctgtgtttgtgtgtgcagtagtcccccattatccacagttctgtcccatgctttcagtcgacggtgcccaactgtggtctgaaaacatttcatggaagttccagaaatagtttcgaaatgtaaaatcacttttattatcactatattgtcatcgttattctcttttattattactgctaatcttttcttctgtctagtttgtctattacatttttcaccataggcatgcatgcacatagtagggacaaggaagtttacgtaggcttcaatactcttcttcatggagagcatccatgggctctcttgagggcgggaaccaccactgtacactgaacatctgcatctggctgacctgacttactgattctcatcccgcacatctgggaataaataccgaagattgctatttgctttgtaaatttcatataggctgcagcctggatcggccttttcattcctgtctgggaagcacaatgcacgtcgagaaggaaggatccagagacccagccctgtctgcttttgctgaaaaccagtttatatggtcacagaaagtaattttcttttcagtgtttccctgtctgtcaagcagggcagaggcttggttcttcctaatgttaaataattctctagtctctctctctctctctctctctctctctctctctctctctctctctctctctggtctttccagtaagtggagtctggtgattttttttcccccatgtacgattgagtctgtataactgtgggctttggaggccttgcaaaccacagctttactttgattggtctaaagtgccgagtctgcctaggctttatgttaaaagcagagcttatgtggctgctggctgattttcttttctttctttctttctttctttctttctttctttctttctttctctttctttctttctttctttcttaaatattgtgagtaagtaagcatttagtgactgagaaactcagatagtcagctctttattattgatcacaaatagagacaatggatttttatacttagggaaaattttttatttttaatagctttaaaaaaaagcaattgggctggtgacagacagcaacttttattcgtggttatggagcagacgagaggggactgctcttgctcactttgtaagacgaacaagataaaattaggttacttctggagtacttagtcagagttcttctccttggttgcgctggggagagagcccacggcctgtatgagccaggaggaactctacagctgaagtacatctctaggaattcatcactggttttaataacaccactgtacttctttgcatttcccaaactagatatatctaaaagttaaacacggcatagtataaaattcatgtttgttctccgtacggcatttttcctttagaatttatcctcctcagccaaagactgaatttgactttttcatttgatccacttggaatctctgaatcgcaaatacaaatttttttctagagcgtttttgagtcctcgattgacttttattttgcatttactaaacctcttcccctatgcaaatttagctatggagtagttaaaacaaaacaaaaacaaaagtaaagagcaacttagtctcttgttgagagattgagcttcattcatattcataaagtggaattgtatgtggtcaccaaagctgtgacttcaggagaatcttcatggatatagcatacattatttttgggaaccagggtccccatatgcagtgatcctcctgcctctgtatcctgtgctgggattataggtgtttgccatcatggacagctctagatcatagtttgagttttccttagtagtttttagattttcggtcatgaagttgtgctataagggggaagagagttacctgggaatacactgcacagaagcacaccttctcagtgcttgtggacatgaggattgtctttaaacacagcgagtggagtaaacaccagaactattttacccccataaggtagaattaggggtggccaccttcccagtaatgatgtgccacagtactgtagcctttgctcttgccacctctgtagggtgacagcttttataccgactttagggttaaattatgacccaggtgtcacacttttgagaggctggttttcatttcgcaggttgcaagtttagtagatctggtgcaagtgtctaattataattattgacacttttcaaaggctgcattaagtgggatatgccacccgtgattctgacagccgtgactgcgtggagcctgctccagaactctccacagaggtttgttgaaacttcacgttgtgggagggattctcagtgaagaggatgcaagacttggaggggaatgtgcttcgtgtcccactgcggactgttgattttcagtctgttaaatgttaatccgatgattatctaggctgacttttcgagaagccccagagttttatcttatgttttatatagtgggagaaaaaacaaaggggtgatgctgttctgtttcgatttgactctttgaaggtgacggagactctcctcctgctaatcgcgtgtctcttcatcagcagacttgtcctgttggatggttgtccccctttcctgtttttgtttgtttgttattgttgtttgagagagtatctcccgtagcctaggctggcctacaactctttgtagtctaggtccttgaactcccaatcctcccaggttggctttgaactcatcctcctcctgtttcagcctccaatgctcagattattggcatgaaccaccatagcatactgccctctattcttctctcttcctctttcttttcttcacccactctgtcccctcatctttcctcctcagtctttctgccctctagttctatcctttgtaccagaggtagagcccagggtcttgtccattgtaagtagatgccctgccactgccccctgcccccaccagtcccagacctgcttgcctgggggatgctcttttcctcatagtatcttcttccatgaagctagccgctgagcatggcgacaagaagggtattgggaagctcaggctacagagaagtccttgcatgcagctgtaagtgagatgccatactgaggggtgcagacttcttagtgcttaagagagctttaagggttaccttccagggcagggatgtttgtgggctgcttgtgaaggttcaacagcaagttctcaggtagccaagggccattcaggcagaggctttgggggcaaggggtgatggtggggtagacagctccccatcagccttaaaagtaaacctaaatagaaccctgtttctcagtgagaactggctggatcagagatggtggcagtggaaccattagaaacacagaggcctgggtctgtctactgggaatcctgctgaactggacccagctcctcattgctctcagcagaacggacaaaccacctgctaaggagtattgattgttattattgttattttttaagtacaggcttgatgatacagaaataataccagactcacattttctagaggtgtgtgtgtgtgtgtgtgtgtgtgtgtgtgcatgtgtgactgtgtgtgtgtgtgcatgtgtgtgtgtgtgtgtgtgagactctgtgtgtgtgtgagactctgtgtgtgtgtgtgtgtgtgtgtgtgtgtgtgtgtgtgtgtgcaggtatgtgtaagccaaagatcggtgtagtgtatcttttttccattgttctccatgattattttttgagatagagtctctcattggccctccagtgccttaatttggctgctctggttggccagtgagcttcagggatcttctagttcctggagccccaaggctgggtttagaggtgggtgtgaccacacctggttcttgggatctgaacacaggccttgtgcttgcatagcacatattttactgaatgagcccttaccccagctcccacaaatgtttcttgtaacctaaaacaggcagcaagctggctcagtgagtaaaaagaaatctcagggacctgaattctgtccctggaccacttgttgggaaagggaactgacaacatagttgtcccctgacccccacatatatactgtgggtatctctctctgtctctctgtctctctgtctctctctctgtctctctctccctccctccttccctttctccccttccctccctcgtcccccctctttcacacacacacacacttgtacacacacacacacacacttgtacacacacacacacacttgtacacacacacacacacttgtacacacacacacttgtacacacacacacacacacacacatactagttgtacatttaaaaaaagattaaaatcagggacttaaatgatacccagggagttccactaaaaggtcctcaaataagtgtgagaaacgcattgtctcagacagcgtagaaggtacgctggagttccgaagtatctgtgatgaggaaaatcattaacttaatcacttctactgggacatccctgggggtcttccaaatttattccgcagaggaacccagtgcagctgttaacactgcaggcttagcggactgccttctgctgagtactgtctgggaaagccaaccaaacttctcaggctcaacactgccttatctgtgttgggaggccagctgtctgggcttgcctgagaatctaggatgtcctgggatataggactttaagaattaaggtcccgagccaagcctggtgctctgtttgtttaccatacataggaattttccttttcccttaaataccagcctgagccccattctgatggagcggttcctagcctcgtctgcatctctgtaccccatcccagtggctgagcttgtgtctaaattagtctgggatactatggaatgttttgagggtccccgagtcattctgtcacgtatgaaagttgttcaaagcaattaaacgtgtggaaatgcagtcctgatgtgccacttatggatttattttaatatgcaatagaaaaggaacattatccattaaaacgaaaagagctgaaatgccactcagcagcatgctggggggatcatcgtcctctctgccctgctctgctctgctctgctctgctctgctctgctctgctctgctctgctctgctctgctctgctctgcgggaacactcaaggagggatggtaggctggacagacagtgaggagcacaggagtctgcttagcacagggagtggcccaggagctgtttttaaggacagtttggaatgctgagctgttgagatgcagactggtaaggtaaggatctgggacggggtgggatctggagtaattagctgttagtagattctggaagttgacttggattgatggccctcagggcacttgggccgtgatgcacatgtccgagatgatgaactaggaggatcagcacttggatagggacggataatcacataccctagtgcaagctacagggatatgtgagtggggatcacatttttcaggaagagaggtcagagagtagatctgccccagggcctggcacgagtgtttggggaaatcggtgtggagacagctgggaggtggctggtatgctggggggaggggggctgataaactcatgcccaagagctcaaggagctagtatatgttggtcatttcggaggtctttgtgatctttctatagactcagtatgaagccaagttgtactgggctgaggaggaggagaaggaaaaaaaggagaaggaggaagaggagaaggaggaggtaatagctagctagacgtaaggacttttctagaagtttttttttttttaaactaaagaaaggacccaaggtgatacttaatttcaagagataagtctggcctgttgagtagaccccaggttattcacagaggctattccataagtaaatacacaaggggtggtcagatactcacaggggatgtgggagccccttggggctccatgaggttgcctatctagccagctcacaattcttccctttgtacccctgaagcctcttttgtcattccctggacacaacaatggcaagatcagaatttacgtgtttataaatttctttaaggattctttttatggtggtgataagatagggtgtgataagagtccaacctttgttcgtgtcactgacttctgagagcactttgagtttacacagaacaccgcattggtgagtctctcaggcaccttgtacaggaagcagggcagacaatggattagtccacttttcagggaagggatgccttggagtttaaatatagtaaggacttgatgattaatgattttcaggatgggtccaggatagtttgtttccattatataaattttttcattatattaattagtggggaatatgtttgaagtttgaaggtttttgttttctgtttccagttagcttataaagccccaaggttgagacaagtgttttcagttgagtttttttattcgcttacccattcactgctgctctgagcagttgggtattagtgagagggatgggtagagggggattgcccactccaaagatgtttcccgttacctttgaaagataagagttccaggaatatgacaacaggatggacagaggcatcatggatcctgtcgcttgaaccgtgtcgtaactggaccattcagttattcttcaggtcagtccagtgctatcgtccatcttgggtgttttgtaaacatctaaaatataccttgcttttatcactctagtcagatgcttttgatgtataaggaagctgtatccaatgaacccaatataagtcgaaaataagcaaaatcaaaatgcgttttaacttggtaacgtcttagtttagccacacaatgtgctagagcatcagcctgaagcttggggctgagaagggtggaagcgtgtttccatctatttttagcctggggaagaatcaaaatttacattaaaaaaaaagaatactgagaccaaaaaaaaaaatgtattgtcgtgtgtgtgtgtgtgtgtgtgtgtgtgtgtgtgtgtgtgtgtacacttgcctgccaaggcacatctgtagaggtcagagaacaacctttaggagttgggtttctctttcaagcattagtttcagggatgaactcaggtcatcaggctgcagattctgcccttatccactgagccatctcactaatctattttttgcattttttcttttctttccttttttcattcatcctcttcctcatatgcctcctccctccctccctccctctctccctccctccctccctccctccctccctccctcccttccttccttccttttcttcctttctaggcagggtctctttctttctgtgtagtcttggctgtcttggaccttgtagaccaggatgccctcaaattcaccaagaccagcctgcctctgtctcctgactgctaggattaaaggcctgtgccaacctgtctggcttttttctttctttcttttttttaatgttactttttttttcttttttttgagatagggcctcattgtataggtctttgttaaccaggctggacacaacaattagctggtctctgcctttcaagtgctggattaaaattgtgcaccacattttaatggtctcatgttaaaagaagtattattttgtatgtgttaggtaggagtgggtgtgtgcatgccatggaaggcatgtggagatcagaaggtaactctgtggagtcagttgtcctccccccccccactgccgtcatgcggatttcatggatggaacctagattaccagctttcaagcgcttttaccactggctcccagattcccctttctaagtgggtgagagaggatttattcaatgcacatatgtttcaagctattgtaaggtaaaacaaaagtccttaagtcaagccatcgtaaaccagagtgagtatcttcctttgtgtagaggctgcccccatatgtgagcctcataccaactgtgagctagggacaagcatagagatgagtgaatgccccccaccctgaccctgggatctgaccgattagcaaaccccatcgtgttcagcaagcacttcctgaccaggtcacgggcacccagggagtaggtgttgaggatggaggcaggttgttactgcggtccattttctcctttttaatcacagggaaccactgtcaagtgtttatttcttgtttgtgtttttccgatgagtcattaagtctacagtattaagatttggagaaggggagcgatgagagaataaagaaatagaattcgtaagttagagcaagagacagaggtttggattagcgaggaggggtttggaccgagcagtaaacagttgaaaggaagagaacatccctctggggaagctggaaatgtgcatgggaattttcaggagagcacaccagaggggcccgaggatgaggtagtagggattcaatgcagcgtcttagaggggaatactgtaggctgttttccaatcttaattacagccgcaatatgacaaaagcgtataatatttttttttctgccgccactaatggctggtagagtgtagtctctcttgtgtaattcagcttgcattgcagtttgtttttttgtttttttgtttttttttttttttttatttcttaggatatcctgggttgaggagaagtcataaaaattagactcattttctcatgtttatattaaagttttagatggtttcatgatgaaggaaggagacttttagtcaccaaggaggttgagggagatgagttaatgatgtttggtcatcaaaagatacaccattaagagcttatttcttttgggaggagcaaagggcaaactatgagtcagatagtctataaagtgacatccctccgcttgatccagccacccttctgcaacaaagatcaggggcccagcaaggacaagtgagaaggggatgcttgctgccgtgtggagtgggagagcttcccccaaaactacccacagtcctccaccacagctctgattctgcagaaattggcactttatcttactgttttcacaccgtagttcaaactggcctaggactcacgaagtaccccacattggctttgaacctgagctagttctgcctcagccttcctagtgttggcatttcaggtatgagccaccatgcctggctctaaggttggcatgtccaacgattatggtcacatgtgagcttaccaggttatagttggtttaaaacctcaaagtcccattttttttttttttttggttctttttttcagagctggggaccgaacccagggccttgcacttcaaagtcccattttttgattctgactggaaccgtgttccccctcgtgatgaaccgttaaaagggtttcatctgtaatgtggggagagcatgagtttgtttgggggataaagacactttcaaggcacttggtgtgcactagtcccgtggcaggatcattgctctctccatacctgctgttggtcccttgataaattctactttttatttttaactttatttttttggagctcatcctcacttggaatgtactgtgtacatcaggctggctttgatacggcagagatcctcctgcctctgcctgcctggtattgggattcaagttgtgttaccacacctggcaataacgtttccttttgatgtagattaggataattattaaatgtttgtatagaatcagggggcgataactagaaatatatatgtctgaaagtagaatttttttttttttttggagacatggttttctgtgtgcaacagcctatcctggaactggctggctttgaactcacagacatccacctgcctctgtctcccacctgcttggattaaaggtgtgagccactgcctggttagactgaaatgttaataaaacatacttcaccttctctttatttttgggtctgtttggttcaggggttggtactttttaacgtttcctttgtctttgaatattaactatgtttccggttctgcaatagtgacccaaggctcagaagtgccgttcctggctccctgagaattctcagctcagtgagggagccacatgaacaggtggctgggttcagtttggccagtgcggaaggtgcgctgtgtacagcagagatgcaagggggaaatgccagcccacttttgggaaagtaggaaaggtcctgacagggtgggtgctaaggtatggaggctttgggtagtaagtttgcctggtgatgtaaggaacggtactttagcatggagaacattccacacagccgtggagggcatagggagaaaagttggcgcactctgggaacttcagatagtttagttaagcaatagcttacagtgggtgtgccctaatgactgagctggagagaagaggaggggattcccttaccaagactacttactgactgccagtcatcagtcgcaaactttgtacctattggggaattgtaggcagggaagagatttgattagatttgaatcttggaatgatcactaacaccagtttttaagggatggccttttataaaatttttatataatttttgtctatagcaggcacagtgggacacacctgtagtatgttgaggttgaggcaggaggattgatacttgtggatgagtctggtctccagagagagagactctgcctcttttcacttcaagaagcaagtacttcatggtttctctcagccacccaaattggaatagtccctattcctgaggtttgaggccattattaaataacaacgtaagggctacctgaccagcgctgtggtaactgctgcactgatgttcagataacagagatggcaggacagcctaggatgccatccattaagctgctctgagctatatgcatttgaaagcttatgaactatttctgtactgtcaattttttttttaactttttgtttggtgtagcccagtctgctatattagggagggtcacattgtcctactctctgagtctggctactaacagaaatcagaaatatctttccagggtactgtccatgttcccttgccgcttgccacttgccttttaggaccttagttttgtttatttttagtttggctgctcctgtccatatcagtggactctgtgtgtgtgtgtgtgtgtgtgtgtgtgtgtgtgtgtgtgtgtgtgtgtgtgtgatatctatcattttagggaagatttgagttctaaacattacctttgatgcagaaacttaacaggcatgtttcctcaactttcagtctatgctacatcacaaatgtttttttaagagactttggtatgtgcttgctaaggtgatgtgtatagtctcttacctgctagtgtggggatcttactggagaaggaaactgtcgatcttgtatggttttattgttactttaaagctccttgggaaccactttctaagtgtttaagatctgctccgaaatcttgctggggactttagattgctgtctagagactctggtgggattctcagtttagtttttctgaagcctctagtgtttgatcactttggatattcccttgttgacatatatttcaagctttgcaattctctgaaatggccttcctcttctttttgaatttccattttccaagagcctctgaacgttcgttgctcgataaggtagctgctaaccccaggctatgtagagatgccactgtctctagtgaaccccactgacttcaagttgaaagccaatgcaggaaacgctgacccttggaacagaaggttaaggtcaactattctgggaattgagagcagaccatgaaggagcgaaatggccacaattcaagcagttagccttacgcgtcattcttgctggcttatacgtgtatatttgtggcctgtgtcttctgctaacaatgagtcatttttcaaaatgaagtaaatgtgaataaatttatttgtagaatactttgtgtaattgggagtggcgtgccaagaattactgagttttgaaagaagaagaagaaaaaaaaaacccttgaagttggcagctttgacttatgactctagttctgccaaccttgatcagttatctgaaggctgggcaatgtttgtaggctgattctggtgctctagtgttttgtataaactctatctgtatggatgctactaagtttgaaaagataaccaaagagtgaaaggtactagaaatatttttaagtaatttatgatttccatgagttccaatatttttttccaatttctaaattccacacagttgactgtgtgggatttagagacagtgttcttagcacatctttcttgaaagaactgtttgtttctcacctataaaacaatagggatagaaaacgagatataagctttttagagaacgttatagtaatttggcttctgaatataaggggatgtgtggttagtggattgtgtcaaaggacaagacattttgctaaagcgttgatctaccatgggtgggaagtttagttgcatgaactctgatcagggtaagagtgaatgactgctcaagctaggcttgaactgtgagaagagactctgcagagagcctggacactcttaggtggtagagcagtgcagactgctgcaggaatggtatccaattattctagatgatcttttctcttcctgtgattcatttgtaaattggttatggttaggttattggtttcccagtttctgaaatgcttcttttatacagctgttcatatgatcttttcaatccactcatactaatccgtgaggtagacactttcgtatgtggaagaaacttttaaactgctcacattgacttttaaaatacctgatgatttccttccacacttttgtagcacgtgttcttataatgccgacatgtctcaactagactgttaccgtttcagttaactcctctttgtatggtccctgaacctaactgctgcatttgatgatcctcactgttagtgagtcagggcttgtgttgtgcacagcaaggacatcttttctctgtgtcaagtctaggaccacagctgggagcatttggtaaactggtccctcccacagttcattctttccattccctcatgtctggctgccgatgctgtcagttgagagctcttgggactggcaactgaaatacctacctacggtgcctctacccaggctctttgagcttccccagaacatggcagccaaggccccagagcaggtatctcaagaggcagaagatgggagctacaaatttcttaagacctgatcctagaaactgttactgttacttccaacacactgtatccattgagctgtcatggatacaatgtctggaggagtgggtgtaatcccgccttagtgggaggcaagccatgcgagcagatggtttcagctaatctttgcgcacctctcagtacctacctcagttttctccctgcactcatggtctcctccctagtccaacgccatgtctttctccacgaagcacctgtacaaaatccgtttatgtatcctaggccactactgtctagttcttttgtagttattttttagtagactgcagagttctttgaatgtaagaaccaggtctggtttacctttgactactttgtagcagataaattccttgaacagagcattcaatgtcaaagcaggtctcaaatttgagagccagatggggtgggagttcgcagtggttgaatagggaattgtaatgagcaaatcaaacacttcccttggaatagagattatttctgatgttgaattttaaagcttaaaaaaaaaacttctctttgttatatagcaaaagttatatgcctcccctcccctacattgctataaaattaaaagagagctgagtaggggtgatttttgagtagttttttttttgtcgttgtttgtttgtttgtttgctatttaccattttttttaaactaggtcaatctttgaccttgacctgtaggtcatagtatttattttttgaaaactatggttttagtccatttactgggtcaatttaaggagtaacatccaagcttataaataaaaggaaacagaagctttggataaaaattcatgtcttgcaaaggataagaattatttcatgaaattttcagtttcagttttatgtatgcattgcctgtaatgagttgaaatgtaaaatacattctctttattttaattagggataaaaagaatttatcagaggccttctgtataaatgcattgttcgccatttacctctttttctttaattctttcaaagtccttccctaggagtctatcaaccccgtctgatgagctcagatgcagttttttttcctcaatttttgtttttaatttctgtgttagccattctgtccccaacccccttatcccctccatcctatttcttgctagatgtggcaagcacatgactataattcctgcatttgtagagacagaaggatcaggagttcaagtgtcgtttggattacatgacagcaaaaatgacctaatttttcagtttgtcatatgctactgattttcttccctcttggagactttaaacagcctcctggctctgaagaaaaaaggagtcagcgtattctcttttagtattcattctttcgagtgtgtttgtgtgtgtatgaatgcaggtggtgtgtacatgtgtgtacttgcttttgcagagttcagaggacgaccccagaggtagtttctcaggttagagcttttgagattgcttctcatttgccttgctaggctggttagccagtgagccccaggaaactgtctctacttccttagagctgggagtataaacccttggtctttaaccaaccaactaaacaaacaaacaacaacaacaacaaaaaacacaaaacaaacaagggatcccacttgtcctcaggcaaggcaggcacttcactgactaagactccatccagacccatctggtttcttaccaagacatagctctcagagtgcacaacatctcggcctgcaactcagtgagttttcctacccgagttggtctgggtgagcactgtgggggaaacagattattcaggagaccggtgtgtgacgagttggtctgggtgagcactgtgggggaaacagattattcaggagaccggtgtgtgacgaagaaataggtagagttttctctcattgttttcttcaaaatgttcagtagtcccccagcccccacaatttgtagtttttctttctgtaattccagttattggtgttatcatcttaaggccccaaacaatacaatgaaaagtcctggaaataaactctttctcagtttaaaattgctcgttattccaaacagtgtgagagcacacgttatactggtccatcctttttttttttttttgagacaagcgttgttcctttgtggggcgtttcagtgctacttgcctgtgagtcctttagaaaccatcgcagttaatcagatcggttatctcagaaacccttcctatttaataatgtccccaaagaacaagagtgatcgtaatacacgtttactataatatcagcaaactattagtggtcattgttaattcattactgagtcgaatttaccagttaagctttttgtaggaatgtaacggggaggtgaaaaccggtgtatgtggctttgggtgttgttcctagtttcaggtaacagctggggatctggaatgtgtctctcttagaggaaagaggaccattgcaataatgtttaggggtgcacaagtgtgtgtgtgtgtgtgtgtgtgtgtgtgtgtgctagtggcagtcagaggacaatactaggtgttggttcttaccttccacattggtggaaacagtgtctgtctttggctgctgtgtgtgccaggctagctggctggagaggttccttctttctccgccccccctcatgcagtaggaatgctggggttatgggctacaatgcctggtttatttggcttctgggatccaaactgaggtcctagccattgtcacaagctaagctgtgcattgcttagcttttcgaggtctctgactgagttgggaagtgttcatgagggatgcatggtgattgggaactggtgaagaattgactgggaccagcagagctaagaggtggaagaaaggtggcgtcattccaggaagatttcagagaagaaaaccttactcgaatctcagaacagaatggaaacatagaaattaatttgctatcgcctctctgccaagttatgacattttaaatctcaaaacacaagggcttgttcccttacagttttgtggattctcagggagaatttgcttccttgggctggtggccccttctgtctgtaaggacattttttttctttcaatctctatgcctgtggtctcaccactttctccctgtccccctcttaaagggaagcttgtggttatatttagggcccaccaggataatctaggataatcagctcacctccaaatccttatttaattgcatctgccgagtcccttgtcgagtaagcgccactcacaggttctggagttgaggatgtggacgcccaggttttgtttttcaaggatttttcttgacaaagggaagggctatcagatattcagagccagcccgctctcctttttagtatgatgttgatattccagcccagcacattgtggatttattttcttgaaggagcatgtttagtgagtccccgttagctaataaaactagttgagccaagactgacattcaggttgctgttcagtgtaagagcacattgagcttttgggtcttcttttcgaggctggtagagcaagcctctctccatggtttcctggttagcttggtttcttccctttgccatgtcttcctctagcttataaggccccatcctcctcttattccaaaggccactttccttgatatcccttgcaaacttgatgacttctggtgataggaataaactctatctcagtctgacgtgtgaccggatgggtcaaccaccaacagggctgtgctcttggtgctgaaggggaagactcctttcttgttctttccagctctatccagttttgtgtggcttgtgacaggataattcccatctggacctccagcttcaccagatcttttttcccctgcatcttctgtaaggacttaaggcccacacagataatccaggatcatctcagccccagatccttaacccaattagcataattaatttgtaaagaccctattccgaataagccctgtgtatgccaggcctgttgtggctgagaatatatctgagagaaacaagttgaagggacaaggtgggctgtggctcatgtctgcagaagccagcgaccgttacctgtaggcttagtttctacattgcagtctaatggcgtcagattgtgaatctatcaatggattaatccattgaggaaatcagcacttgtggtcctatgtcaacactttgaacacccatttggggaccaagccttgagcacccaaacctttagggggcttcttccacgaataaggacataccacatgctctaggaataggatatggacatgacttgtaggtgacacttaggacaccacccacatcactttagcctgaagtcatggattttcttttttatttttctttttgactggggtacctacatgaccttttgtttgttttgttaatgtcttgtcttcttcctttttggtaggagcaaaggagctgccctctgtgtctccccgcccttcagcgagagtctggaaagagaaccgaggtgctactgcagtggatgagtagagaagagtctggtaagcctgctggggcagggcattggaggtctgctggatgaaggttgaggcctatcggcagacgtgtcactgttacttgagaatttgtcacatctgcctcttggaagtctttagttccactggagttgaataatcctttgcagtggcgattagcttcgtccttctgtgtggggattgtgggaatataccatcctgcccgccattcccagaagatgcttgcaggcacctgaaggtgatttccctccgtgcagtggaggctggagtcagagagggcagccagacacccataggagatggttgccttactttgcctctctgaatgcatatgtgctgtggattactttcctaggagcactggcctttggttgttttactaattatggtctgctttagagttggtttaattttaaggttctcagtgttttgtttttccttttgtcccagtcttactttgaacagatgcagccattgtgatcctcttcaagtgatgctatgacttttttgaacaaagcacttgaagttgattcatttcagccttttttttttttaatttttaagctggtatttaatggtcaatttcatcttgttttattttaatagacaaacctagtgcctggtaaagtccttgttgtaatgtaaccattacttagagtgacagtgttccatcacaatagacacgcccataaagggttaatcttgtgctgaggtggagatagtggagagggaatgcagaaactgcatacagtggaccaaatagcctggagtgttaggcaacagtggagccggcctgctggtctacctcaccttagcggtgtggtattagaggggttatatattttccttgaacctgaagtgtttttatctgtaaaaaggagatcctggtgtatattgggaggattaaggataataatttgtagataaatcactagcacagcaattaatgtttggtacctgaaaacattcagaattttgtgcccgctagttatttcttatacaggagaagctgaggcagaggcaatgttttcgggatgttacaaactgcctccagtaagactctgactttggtggtgttctatgggctatgtcaggaacaacagcagtggctgtgggtatatattttgttactttgcagacaggaatggcataaccagttgcctctctgatctgacccacttgatacactgagctcttttgagactccacttgccattcctgtgaggtttctacctccaaactcaatggagctatctggtttagaagtgtattgattagcattaaattccctcttctccctccctctccctctccctctccctctccctctccctctccctctccctctccctctctctttgtagtactagagttcacacccatgacattgtgcatactaggcaatcttcaacctaaaagtacttaaggaatgactgttgaagcccaagaggtttattctgtattgtggggcttctataaccatggcgtgattaaacacattgtcctttgaactaggaaacctggagtccgcacagagtctccagtaacaggggaatgtcacaacagacccctgcccagagtgaacgctatcattaaaaggtttctgtaggtcctacgccatttttggttagcccctgagtacaataatattatttctgcttctttactggaggtgggaggataccaacgatagtcacagcatctccatgggaaaatgcatgcatgtagtgggtaggacaggaagtgaactcagagggccaggaataccctctgcactctgtgaagtttgtggctagcatgacctttgctaggagcaggaagttggttaaagagatctacgcacactgtggagcaccagtgtatgcagcactttggtaggtcaatgtagggagcactgcctttggctctggattgtggtggttctatgttatttgtttgtttatttatttatttataaaaataatgttcataaccaggaatacgtcttttagagtggttcctccaaaaagccaaataaaccctggggctttgtgattgtcttaaaggaggtgggccaggttagcctttttccttttctttcccttccagtgacaccgtacatactgatattgtacagtttattctcagtctcaaactgagatttaaaattttgggggaatcagaagccaagggtggagaagatgggggttagacataaggcctgacacggtgctgagtaggctgtatatgtgtctcctgtttttgccatgcctggttgcttgtgctgactttcttgggagaaagtcctggctgcagttctgtagccaacaggggtaagagaactgtgactctgccaggtctgcagccacgaggatatttatagtttgctgcaagtggctgggagtctaccctggtctacatatgccttctgtctgaaagttctggatgttcttgacctggaccctgcccttgtctgccagacagtagttaatgataaagtggacggctgcaggatacagtgagtggtgaccttggcagctcatggcatgcaggtgcttgtgccgtgactgacatgagtgtccagcaaagtggagctgttctctctgctgccctgctcatggctgccatgagttctagcctccctgtagccaaactcactgacatgaactgtgtgagctgaggttgggttcttcttcttcttcttcttcttcttcttcttcttcttcttcttcttcttcttcttcttcttcttttttgtggtggttgttgtttattttattttattttatttatttatttttgagacaggcttttactctatagcctaggctggctttattattatgccgtctcttctgccttagctgtgtaagaacccggattgcagaacccagccaacacactaggttccagtcggttttctgtatgccacttattccgtgctaagacgtataacaccaaaggaatatgcagatcctgagcctccctggctcatctctccatgaattcaggtcagacacctagactcactttacagaaaggcctgaatcaggccatacttcccaattccggcttataatagatggaagagcttcaaggaaacatttgcctttgtcctggttttcaggagaaggtagaagaaggtgtgcatttggcgagtgtgtgcatgcttggtttgcatttgtaaggcctagaaagctcagggaaggtgacattgaatggctgcttcagatctgggctgaccaatgctcgacaagtaatatccctgggacctgtccccagcccctatcgccccacccctattccccccactcctggcactcaaattcttcctctgtcagagccattctcagacaagatttattaaccctttacgatggcagggttgctgaggcatagtctcccacagtcaaacatcctgagaaaaacaaacttccttttctgagttgttccagtaaagcaagtcactgtg

SEQ ID NO: 427 - DNA, 3332 bp, synthetic construct
  misc_feature 1..3332: note = Synthetic
  source 1..3332: mol_type = other DNA
gctctttgcagccgccgccgccgccgcagcctccccctcggcgcagggggaacttttctactctctgtgacggtctcccccgccgcccccgggggcaagcccagctggtccgcccgccccgcccgcggtcgtgctcccagcccgagcctctgcgcctcgggaagtttattctgcccgccctcctccccttcctcctcctcttcaccccgcctccccgccctcccccggctctttcccccgggtggctgccgctgccgccgctgccgctgccagcctgctcctcggccagccgcgccggccccagggccgggaagctcccggccccacgcaccgctccgctgcagccaccgcagccgccgccgctctgggccggccctcggcccccggctcccggccccgcagagttccgggctccctcgccggctgcaccgccccgccccgccccgcgccgccccgcgccgcgccgacctgcagcgcccggctgcctcgcactccgcctcccccggctcagcccccggccgcggcgggacccgagcctggagcattggtaagcgtcacactgccaaagtgagagctgctggagaactcataatcccaggaacgcctcttctactctccgagtaccccagtgaccagagtgagagaagctctgaacgagggcacgcggcttgaaggactgtgggcagatgtgaccaagagcctgcattaagttgtacaatggtagatggagtgatgattcttcctgtgcttatcatgattgctctcccctcccctagtatggaagatgagaagcccaaggtcaaccccaaactctacatgtgtgtgtgtgaaggtctctcctgcggtaatgaggaccactgtgaaggccagcagtgcttttcctcactgagcatcaacgatggcttccacgtctaccagaaaggctgcttccaggtttatgagcagggaaagatgacctgtaagaccccgccgtcccctggccaagccgtggagtgctgccaaggggactggtgtaacaggaacatcacggcccagctgcccactaaaggaaaatccttccctggaacacagaatttccacttggaggttggcctcattattctctctgtagtgttcgcagtatgtcttttagcctgcctgctgggagttgctctccgaaaatttaaaaggcgcaaccaagaacgcctcaatccccgagacgtggagtatggcactatcgaagggctcatcaccaccaatgttggagacagcactttagcagatttattggatcattcgtgtacatcaggaagtggctctggtcttccttttctggtacaaagaacagtggctcgccagattacactgttggagtgtgtcgggaaaggcaggtatggtgaggtgtggaggggcagctggcaaggggagaatgttgccgtgaagatcttctcctcccgtgatgagaagtcatggttcagggaaacggaattgtacaacactgtgatgctgaggcatgaaaatatcttaggtttcattgcttcagacatgacatcaagacactccagtacccagctgtggttaattacacattatcatgaaatgggatcgttgtacgactatcttcagcttactactctggatacagttagctgccttcgaatagtgctgtccatagctagtggtcttgcacatttgcacatagagatatttgggacccaagggaaaccagccattgcccatcgagatttaaagagcaaaaatattctggttaagaagaatggacagtgttgcatagcagatttgggcctggcagtcatgcattcccagagcaccaatcagcttgatgtggggaacaatccccgtgtgggcaccaagcgctacatggcccccgaagttctagatgaaaccatccaggtggattgtttcgattcttataaaagggtcgatatttgggcctttggacttgttttgtgggaagtggccaggcggatggtgagcaatggtatagtggaggattacaagccaccgttctacgatgtggttcccaatgacccaagttttgaagatatgaggaaggtagtctgtgtggatcaacaaaggccaaacatacccaacagatggttctcagacccgacattaacctctctggccaagctaatgaaagaatgctggtatcaaaatccatccgcaagactcacagcactgcgtatcaaaaagactttgaccaaaattgataattccctcgacaaattgaaaactgactgttgacattttcatagtgtcaagaaggaagatttgacgttgttgtcattgtccagctgggacctaatgctggcctgactggttgtcagaatggaatccatctgtctccctccccaaatggctgctttgacaaggcagacgtcgtacccagccatgtgttggggagacatcaaaaccaccctaacctcgctcgatgactgtgaactgggcatttcacgaactgttcacactgcagagactaatgttggacagacactgttgcaaaggtagggactggaggaacacagagaaatcctaaaagagatctgggcattaagtcagtggctttgcatagctttcacaagtctcctagacactccccacgggaaactcaaggaggtggtgaatttttaatcagcaatattgcctgtgcttctcttctttattgcactaggaattctttgcattccttacttgcactgttactcttaattttaaagacccaacttgccaaaatgttggctgcgtactccactggtctgtctttggataataggaattcaatttggcaaaacaaaatgtaatgtcagactttgctgcattttacacatgtgctgatgtttacaatgatgccgaacattaggaattgtttatacacaactttgcaaattatttattacttgtgcacttagtagtttttacaaaactgctttgtgcatatgttaaagcttatttttatgtggtcttatgattttattacagaaatgtttttaacactatactctaaaatggacattttcttttattatcagttaaaatcacattttaagtgcttcacatttgtatgtgtgtagactgtaactttttttcagttcatatgcagaacgtatttagccattacccacgtgacaccaccgaatatattactgatttagaagcaaagatttcagtagaattttagtcctgaacgctacggggaaaatgcattttcttcagaattatccattacgtgcatttaaactctgccagaaaaaaataactattttgttttaatctactttttgtatttagtagttatttgtataaattaaataaactgttttcaagtcaaa

SEQ ID NO: 428 - protein, 509 aa, synthetic construct
MVDGVMILPVLIMIALPSPSMEDEKPKVNPKLYMCVCEGLSCGNEDHCEGQQCFSSLSINDGFHVYQKGCFQVYEQGKMTCKTPPSPGQAVECCQGDWCNRNITAQLPTKGKSFPGTQNFHLEVGLIILSVVFAVCLLACLLGVALRKFKRRNQERLNPRDVEYGTIEGLITTNVGDSTLADLLDHSCTSGSGSGLPFLVQRTVARQITLLECVGKGRYGEVWRGSWQGENVAVKIFSSRDEKSWFRETELYNTVMLRHENILGFIASDMTSRHSSTQLWLITHYHEMGSLYDYLQLTTLDTVSCLRIVLSIASGLAHLHIEIFGTQGKPAIAHRDLKSKNILVKKNGQCCIADLGLAVMHSQSTNQLDVGNNPRVGTKRYMAPEVLDETIQVDCFDSYKRVDIWAFGLVLWEVARRMVSNGIVEDYKPPFYDVVPNDPSFEDMRKVVCVDQQRPNIPNRWFSDPTLTSLAKLMKECWYQNPSARLTALRIKKTLTKIDNSLDKLKTDC

SEQ ID NO: 429 - DNA, 2933 bp, Homo sapiens
  source 1..2933: mol_type = genomic DNA
cctttcccctggagatttgaacgctgcttgcatgggagaaaagctacttagagaagaaaacgttccacttagtaacagaagaaaagtcttggttaaaaagttgtcatgaatttggcttttggagagaggcagcaagcctggagcattggtaagcgtcacactgccaaagtgagagctgctggagaactcataatcccaggaacgcctcttctactctccgagtaccccagtgaccagagtgagagaagctctgaacgagggcacgcggcttgaaggactgtgggcagatgtgaccaagagcctgcattaagttgtacaatggtagatggagtgatgattcttcctgtgcttatcatgattgctctcccctcccctagtatggaagatgagaagcccaaggtcaaccccaaactctacatgtgtgtgtgtgaaggtctctcctgcggtaatgaggaccactgtgaaggccagcagtgcttttcctcactgagcatcaacgatggcttccacgtctaccagaaaggctgcttccaggtttatgagcagggaaagatgacctgtaagaccccgccgtcccctggccaagccgtggagtgctgccaaggggactggtgtaacaggaacatcacggcccagctgcccactaaaggaaaatccttccctggaacacagaatttccacttggaggttggcctcattattctctctgtagtgttcgcagtatgtcttttagcctgcctgctgggagttgctctccgaaaatttaaaaggcgcaaccaagaacgcctcaatccccgagacgtggagtatggcactatcgaagggctcatcaccaccaatgttggagacagcactttagcagatttattggatcattcgtgtacatcaggaagtggctctggtcttccttttctggtacaaagaacagtggctcgccagattacactgttggagtgtgtcgggaaaggcaggtatggtgaggtgtggaggggcagctggcaaggggagaatgttgccgtgaagatcttctcctcccgtgatgagaagtcatggttcagggaaacggaattgtacaacactgtgatgctgaggcatgaaaatatcttaggtttcattgcttcagacatgacatcaagacactccagtacccagctgtggttaattacacattatcatgaaatgggatcgttgtacgactatcttcagcttactactctggatacagttagctgccttcgaatagtgctgtccatagctagtggtcttgcacatttgcacatagagatatttgggacccaagggaaaccagccattgcccatcgagatttaaagagcaaaaatattctggttaagaagaatggacagtgttgcatagcagatttgggcctggcagtcatgcattcccagagcaccaatcagcttgatgtggggaacaatccccgtgtgggcaccaagcgctacatggcccccgaagttctagatgaaaccatccaggtggattgtttcgattcttataaaagggtcgatatttgggcctttggacttgttttgtgggaagtggccaggcggatggtgagcaatggtatagtggaggattacaagccaccgttctacgatgtggttcccaatgacccaagttttgaagatatgaggaaggtagtctgtgtggatcaacaaaggccaaacatacccaacagatggttctcagacccgacattaacctctctggccaagctaatgaaagaatgctggtatcaaaatccatccgcaagactcacagcactgcgtatcaaaaagactttgaccaaaattgataattccctcgacaaattgaaaactgactgttgacattttcatagtgtcaagaaggaagatttgacgttgttgtcattgtccagctgggacctaatgctggcctgactggttgtcagaatggaatccatctgtctccctccccaaatggctgctttgacaaggcagacgtcgtacccagccatgtgttggggagacatcaaaaccaccctaacctcgctcgatgactgtgaactgggcatttcacgaactgttcacactgcagagactaatgttggacagacactgttgcaaaggtagggactggaggaacacagagaaatcctaaaagagatctgggcattaagtcagtggctttgcatagctttcacaagtctcctagacactccccacgggaaactcaaggaggtggtgaatttttaatcagcaatattgcctgtgcttctcttctttattgcactaggaattctttgcattccttacttgcactgttactcttaattttaaagacccaacttgccaaaatgttggctgcgtactccactggtctgtctttggataataggaattcaatttggcaaaacaaaatgtaatgtcagactttgctgcattttacacatgtgctgatgtttacaatgatgccgaacattaggaattgtttatacacaactttgcaaattatttattacttgtgcacttagtagtttttacaaaactgctttgtgcatatgttaaagcttatttttatgtggtcttatgattttattacagaaatgtttttaacactatactctaaaatggacattttcttttattatcagttaaaatcacattttaagtgcttcacatttgtatgtgtgtagactgtaactttttttcagttcatatgcagaacgtatttagccattacccacgtgacaccaccgaatatattactgatttagaagcaaagatttcagtagaattttagtcctgaacgctacggggaaaatgcattttcttcagaattatccattacgtgcatttaaactctgccagaaaaaaataactattttgttttaatctactttttgtatttagtagttatttgtataaattaaataaactgttttcaagtcaaa

SEQ ID NO: 430 - DNA, 3312 bp, Mus musculus
  source 1..3312: mol_type = genomic DNA
ccgcctccccgggttcagcacccgaccgccgctggaccagaggaacaaaggagctgcccccgtgtcacccagcccttcagtggaagtctggaaaaggaacagaggtgatattgcagtggatgagcagagagaagccggcctctggtgctcttgagctggtctgcccatagggagcctgctgggagaaggtacagcttccggaagactcctcccggagcgcctctcccatcctcctctcccttggagcagtcagtacctctctgctggaggatctgggctgggtgtgccgggagctggctttaactgtagccctgtcaggctttccccggacctcgcggaagagcgtcaccagcccccacggctttccaacacatcacctcttttcatgccgtttggcacagatcgaatctacagggatgaatggatccagggtctggttttaagttctatggtagtcgtccaaggagccattggtattcatctaacgcaaacgatcaagttacattctgaaagtaacatcccaccagaaaccctccagcagcagtcacgtctgtgtaaagccaagccctggcatgcgcactgccaggtcagagtgtggtggtacacgtgtttaacaggtcatttgtcaactgaaggaaagaccccggcttgacttacctgttatacaatggtcgatggagtaatgatccttcctgtgctaatgatgatggctttcccttccccgagtgtggaagatgagaagcccaaggtcaaccagaaactttacatgtgtgtgtgtgagggcctctcctgcgggaacgaggaccactgtgaaggccagcagtgtttttcttctctgagcatcaacgatggcttccacgtctaccagaagggctgctttcaggtttatgagcaggggaagatgacgtgtaagaccccgccgtcacctggccaggctgtggagtgctgccaaggggactggtgtaacaggaacatcacggcccagctgcccactaaagggaagtccttccccggaacacagaatttccacctggaagttggccttatcatcctctcggtggtgtttgcagtatgtcttttagcttgcatccttggagttgctctcaggaagtttaagagacgcaatcaagagcgcctgaaccccagagacgtggagtatggtaccattgaagggctcatcaccaccaatgtgggagacagcactctagcggaactactagatcactcgtgtacatcaggaagtggctccggtcttcctttcctggtacagagaacggtggctcgccagataaccctgttggagtgtgtcgggaagggccggtatggagaagtatggaggggcagctggcaaggcgaaaatgtcgctgtgaagatcttctcctcccgagacgagaagtcatggttcagggagacggaattgtacaacactgtgatgttgaggcatgaaaatatcttaggtttcatcgcttcagacatgacctccagacactccagtacccagctgtggctcatcacacattaccatgaaatgggatcgttgtatgactaccttcagctcactactctggatacggttagctgccttcggattgtactgtccatagccagcggccttgcccatttgcacatagagatatttgggacccaagggaagtccgccattgcccatcgagatctgaagagcaaaaacatcctggtgaagaagaatggacagtgctgcatagcagatttgggcctggcagtcatgcattcccagagcacaaaccagcttgatgtgggaaacaacccccgtgtggggaccaagcgctacatggctccggaagtgctcgatgaaaccatccaagtggattgctttgattcttataagagggtcgatatttgggcctttggccttgttctgtgggaagtggccaggcgaatggtgagcaatggtatagtggaagattacaagccaccattctatgatgtggttcccaatgacccaagttttgaagatatgaggaaagttgtctgtgtggatcaacagaggccaaacatacctaacagatggttctcagacccgacattaacttctctggcgaagctgatgaaagagtgctggtatcagaacccatccgcaagactcacagctctacgtatcaaaaagactttgaccaaaatcgataattccctagacaaattaaaaactgactgttgaccttgtcaccggtgtcaagaaggagagtcaatgctgtccttgtccagctgggacctaatgctggcctgactggttgtcagaacagaatccatctgacccccttcccgaagtggctgctttgacggaagcagatgtctcttcccagccatgttccagggggagacaccaaaaccaccctaacctcgctcaaaaactgtgactcgagccctcgatgaactgttcacaccacaaagacttaacggtgggcaggtctggtggcaagggggagggaagtggaggaacccggaaagatcctgcaggcgatctgggcattaagacagtggctctctgcgtatctttcgcgggtctcctagacactccccacgggaagctcaaggaggcggtgaattcgtaatcagcaatatcggctgcatctactcttcgttgcactaggaattctgtgcattccttacttgcactgtggcccttaatcttaaagacccaacttgccaaaacattggctgcgtactccactggcctgtctctggataataggaattcaatctggcaacacaaaaatgtaccgttggactctgctgcattttacacacgtgctgatgtttacaaggatgcgaacattaggaattgtttagacacaactttgcaaattatttattactggtgcacttagcggtttgtttgaaaccgcctcgtgcatatgttaaagcttatttttatgtggtcttatgattttattaccgaaatgtttttaacacccaactctgaaacggacattttcttttattatcagttaaattcacatttaagtgcttcacatttttttttttaaatgtgtgtagactgtaactttcttttcagttcgtatgcagaacatatttagccattacccatgcaacaccacccgatatattactgatttagaagcaaagatttcagtagaattttagtcccaaacgctgtggggggaaatgcatcttcttcggaattatccattacgtgcatttaaactctgccagaaaaaaaaataactattttgttttaatctactttttgtatttagtagttatttgtataaattaaataaactgttttcaagtcaaaaaaaaaaaaaaaaa

SEQ ID NO: 431 - DNA, 19 bp, synthetic construct
  misc_feature 1..19: note = Synthetic
  source 1..19: mol_type = other DNA
tcgtgtacatcaggaagtg

SEQ ID NO: 432 - DNA, 19 bp, synthetic construct
  misc_feature 1..19: note = Synthetic
  source 1..19: mol_type = other DNA
cgtgtacatcaggaagtgg

SEQ ID NO: 433 - DNA, 19 bp, synthetic construct
  misc_feature 1..19: note = Synthetic
  source 1..19: mol_type = other DNA
tttgggcctggcagtcatg

SEQ ID NO: 434 - DNA, 19 bp, synthetic construct
  misc_feature 1..19: note = Synthetic
  source 1..19: mol_type = other DNA
gtgagcaatggtatagtgg

SEQ ID NO: 435 - DNA, 19 bp, synthetic construct
  misc_feature 1..19: note = Synthetic
  source 1..19: mol_type = other DNA
tgagcaatggtatagtgga

SEQ ID NO: 436 - DNA, 19 bp, synthetic construct
  misc_feature 1..19: note = Synthetic
  source 1..19: mol_type = other DNA
cccaagttttgaagatatg

SEQ ID NO: 437 - DNA, 19 bp, synthetic construct
  misc_feature 1..19: note = Synthetic
  source 1..19: mol_type = other DNA
ccaagttttgaagatatga

SEQ ID NO: 438 - DNA, 19 bp, synthetic construct
  misc_feature 1..19: note = Synthetic
  source 1..19: mol_type = other DNA
aacagatggttctcagacc

SEQ ID NO: 439 - DNA, 19 bp, synthetic construct
  misc_feature 1..19: note = Synthetic
  source 1..19: mol_type = other DNA
agatggttctcagacccga

SEQ ID NO: 440 - DNA, 19 bp, synthetic construct
  misc_feature 1..19: note = Synthetic
  source 1..19: mol_type = other DNA
acctaatgctggcctgact

SEQ ID NO: 441 - DNA, 19 bp, synthetic construct
  misc_feature 1..19: note = Synthetic
  source 1..19: mol_type = other DNA
ttgcaaattatttattact

SEQ ID NO: 442 - DNA, 19 bp, synthetic construct
  misc_feature 1..19: note = Synthetic
  source 1..19: mol_type = other DNA
ttttcttttattatcagtt

SEQ ID NO: 443 - DNA, 19 bp, synthetic construct
  misc_feature 1..19: note = Synthetic
  source 1..19: mol_type = other DNA
tgtgtgtagactgtaactt

SEQ ID NO: 444 - DNA, 19 bp, synthetic construct
  misc_feature 1..19: note = Synthetic
  source 1..19: mol_type = other DNA
atattactgatttagaagc

SEQ ID NO: 445 - DNA, 19 bp, synthetic construct
  misc_feature 1..19: note = Synthetic
  source 1..19: mol_type = other DNA
tttagaagcaaagatttca

SEQ ID NO: 446 - DNA, 19 bp, synthetic construct
  misc_feature 1..19: note = Synthetic
  source 1..19: mol_type = other DNA
aagcaaagatttcagtaga

SEQ ID NO: 447 - DNA, 19 bp, synthetic construct
  misc_feature 1..19: note = Synthetic
  source 1..19: mol_type = other DNA
agcaaagatttcagtagaa

SEQ ID NO: 448 - DNA, 19 bp, synthetic construct
  misc_feature 1..19: note = Synthetic
  source 1..19: mol_type = other DNA
gcaaagatttcagtagaat

SEQ ID NO: 449 - DNA, 19 bp, synthetic construct
  misc_feature 1..19: note = Synthetic
  source 1..19: mol_type = other DNA
caaagatttcagtagaatt

SEQ ID NO: 450 - DNA, 19 bp, synthetic construct
  misc_feature 1..19: note = Synthetic
  source 1..19: mol_type = other DNA
catttaaactctgccagaa

SEQ ID NO: 451 - DNA, 19 bp, synthetic construct
  misc_feature 1..19: note = Synthetic
  source 1..19: mol_type = other DNA
aactattttgttttaatct

SEQ ID NO: 452 - DNA, 19 bp, synthetic construct
  misc_feature 1..19: note = Synthetic
  source 1..19: mol_type = other DNA
tttgtatttagtagttatt

SEQ ID NO: 453 - DNA, 19 bp, synthetic construct
  misc_feature 1..19: note = Synthetic
  source 1..19: mol_type = other DNA
aataaactgttttcaagtc

SEQ ID NO: 454 - DNA, 19 bp, synthetic construct
  misc_feature 1..19: note = Synthetic
  source 1..19: mol_type = other DNA
ataaactgttttcaagtca

SEQ ID NO: 455 - RNA, 21 nt, synthetic construct
  misc_feature 1..21: note = Synthetic
  source 1..21: mol_type = other RNA
attcgtgtacatcaggaagtg

SEQ ID NO: 456 - RNA, 21 nt, synthetic construct
  misc_feature 1..21: note = Synthetic
  source 1..21: mol_type = other RNA
ttcgtgtacatcaggaagtgg

SEQ ID NO: 457 - RNA, 21 nt, synthetic construct
  misc_feature 1..21: note = Synthetic
  source 1..21: mol_type = other RNA
gatttgggcctggcagtcatg

SEQ ID NO: 458 - RNA, 21 nt, synthetic construct
  misc_feature 1..21: note = Synthetic
  source 1..21: mol_type = other RNA
tggtgagcaatggtatagtgg

SEQ ID NO: 459 - RNA, 21 nt, synthetic construct
  misc_feature 1..21: note = Synthetic
  source 1..21: mol_type = other RNA
ggtgagcaatggtatagtgga

SEQ ID NO: 460 - RNA, 21 nt, synthetic construct
  misc_feature 1..21: note = Synthetic
  source 1..21: mol_type = other RNA
gacccaagttttgaagatatg

SEQ ID NO: 461 - RNA, 21 nt, synthetic construct
  misc_feature 1..21: note = Synthetic
  source 1..21: mol_type = other RNA
acccaagttttgaagatatga

SEQ ID NO: 462 - RNA, 21 nt, synthetic construct
  misc_feature 1..21: note = Synthetic
  source 1..21: mol_type = other RNA
ccaacagatggttctcagacc

SEQ ID NO: 463 - RNA, 21 nt, synthetic construct
  misc_feature 1..21: note = Synthetic
  source 1..21: mol_type = other RNA
acagatggttctcagacccga

SEQ ID NO: 464 - RNA, 21 nt, synthetic construct
  misc_feature 1..21: note = Synthetic
  source 1..21: mol_type = other RNA
ggacctaatgctggcctgact

SEQ ID NO: 465 - RNA, 21 nt, synthetic construct
  misc_feature 1..21: note = Synthetic
  source 1..21: mol_type = other RNA
ctttgcaaattatttattact

SEQ ID NO: 466 - RNA, 21 nt, synthetic construct
  misc_feature 1..21: note = Synthetic
  source 1..21: mol_type = other RNA
cattttcttttattatcagtt

SEQ ID NO: 467 - RNA, 21 nt, synthetic construct
  misc_feature 1..21: note = Synthetic
  source 1..21: mol_type = other RNA
tatgtgtgtagactgtaactt

SEQ ID NO: 468 - RNA, 21 nt, synthetic construct
  misc_feature 1..21: note = Synthetic
  source 1..21: mol_type = other RNA
atatattactgatttagaagc

SEQ ID NO: 469 - RNA, 21 nt, synthetic construct
  misc_feature 1..21: note = Synthetic
  source 1..21: mol_type = other RNA
gatttagaagcaaagatttca

SEQ ID NO: 470 - RNA, 21 nt, synthetic construct
  misc_feature 1..21: note = Synthetic
  source 1..21: mol_type = other RNA
agaagcaaagatttcagtaga

SEQ ID NO: 471 - RNA, 21 nt, synthetic construct
  misc_feature 1..21: note = Synthetic
  source 1..21: mol_type = other RNA
gaagcaaagatttcagtagaa

SEQ ID NO: 472 - RNA, 21 nt, synthetic construct
  misc_feature 1..21: note = Synthetic
  source 1..21: mol_type = other RNA
aagcaaagatttcagtagaat

SEQ ID NO: 473 - RNA, 21 nt, synthetic construct
  misc_feature 1..21: note = Synthetic
  source 1..21: mol_type = other RNA
agcaaagatttcagtagaatt

SEQ ID NO: 474 - RNA, 21 nt, synthetic construct
  misc_feature 1..21: note = Synthetic
  source 1..21: mol_type = other RNA
tgcatttaaactctgccagaa

SEQ ID NO: 475 - RNA, 21 nt, synthetic construct
  misc_feature 1..21: note = Synthetic
  source 1..21: mol_type = other RNA
ataactattttgttttaatct

SEQ ID NO: 476 - RNA, 21 nt, synthetic construct
  misc_feature 1..21: note = Synthetic
  source 1..21: mol_type = other RNA
tttttgtatttagtagttatt

SEQ ID NO: 477 - RNA, 21 nt, synthetic construct
  misc_feature 1..21: note = Synthetic
  source 1..21: mol_type = other RNA
taaataaactgttttcaagtc

SEQ ID NO: 478 - RNA, 21 nt, synthetic construct
  misc_feature 1..21: note = Synthetic
  source 1..21: mol_type = other RNA
aaataaactgttttcaagtca

SEQ ID NO: 479 - RNA, 23 nt, synthetic construct
  misc_feature 1..23: note = Synthetic
  source 1..23: mol_type = other RNA
cacttcctgatgtacacgaatga

SEQ ID NO: 480 - RNA, 23 nt, synthetic construct
  misc_feature 1..23: note = Synthetic
  source 1..23: mol_type = other RNA
ccacttcctgatgtacacgaatg

SEQ ID NO: 481 - RNA, 23 nt, synthetic construct
  misc_feature 1..23: note = Synthetic
  source 1..23: mol_type = other RNA
catgactgccaggcccaaatctg

SEQ ID NO: 482 - RNA, 23 nt, synthetic construct
  misc_feature 1..23: note = Synthetic
  source 1..23: mol_type = other RNA
ccactataccattgctcaccatc

SEQ ID NO: 483 - RNA, 23 nt, synthetic construct
  misc_feature 1..23: note = Synthetic
  source 1..23: mol_type = other RNA
tccactataccattgctcaccat

SEQ ID NO: 484 - RNA, 23 nt, synthetic construct
  misc_feature 1..23: note = Synthetic
  source 1..23: mol_type = other RNA
catatcttcaaaacttgggtcat

SEQ ID NO: 485 - RNA, 23 nt, synthetic construct
  misc_feature 1..23: note = Synthetic
  source 1..23: mol_type = other RNA
tcatatcttcaaaacttgggtca

SEQ ID NO: 486 - RNA, 23 nt, synthetic construct
  misc_feature 1..23: note = Synthetic
  source 1..23: mol_type = other RNA
ggtctgagaaccatctgttgggt

SEQ ID NO: 487 - RNA, 23 nt, synthetic construct
  misc_feature 1..23: note = Synthetic
  source 1..23: mol_type = other RNA
tcgggtctgagaaccatctgttg

SEQ ID NO: 488 - RNA, 23 nt, synthetic construct
  misc_feature 1..23: note = Synthetic
  source 1..23: mol_type = other RNA
agtcaggccagcattaggtccca

SEQ ID NO: 489 - RNA, 23 nt, synthetic construct
  misc_feature 1..23: note = Synthetic
  source 1..23: mol_type = other RNA
agtaataaataatttgcaaagtt

SEQ ID NO: 490 - RNA, 23 nt, synthetic construct
  misc_feature 1..23: note = Synthetic
  source 1..23: mol_type = other RNA
aactgataataaaagaaaatgtc

SEQ ID NO: 491 - RNA, 23 nt, synthetic construct
  misc_feature 1..23: note = Synthetic
  source 1..23: mol_type = other RNA
aagttacagtctacacacataca

SEQ ID NO: 492 - RNA, 23 nt, synthetic construct
  misc_feature 1..23: note = Synthetic
  source 1..23: mol_type = other RNA
gcttctaaatcagtaatatattc

SEQ ID NO: 493 - RNA, 23 nt, synthetic construct
  misc_feature 1..23: note = Synthetic
  source 1..23: mol_type = other RNA
tgaaatctttgcttctaaatcag

SEQ ID NO: 494 - RNA, 23 nt, synthetic construct
  misc_feature 1..23: note = Synthetic
  source 1..23: mol_type = other RNA
tctactgaaatctttgcttctaa

SEQ ID NO: 495 - RNA, 23 nt, synthetic construct
  misc_feature 1..23: note = Synthetic
  source 1..23: mol_type = other RNA
ttctactgaaatctttgcttcta

SEQ ID NO: 496 - RNA, 23 nt, synthetic construct
  misc_feature 1..23: note = Synthetic
  source 1..23: mol_type = other RNA
attctactgaaatctttgcttct

SEQ ID NO: 497 - RNA, 23 nt, synthetic construct
  misc_feature 1..23: note = Synthetic
  source 1..23: mol_type = other RNA
aattctactgaaatctttgcttc

SEQ ID NO: 498 - RNA, 23 nt, synthetic construct
  misc_feature 1..23: note = Synthetic
  source 1..23: mol_type = other RNA
ttctggcagagtttaaatgcacg

SEQ ID NO: 499 - RNA, 23 nt, synthetic construct
  misc_feature 1..23: note = Synthetic
  source 1..23: mol_type = other RNA
agattaaaacaaaatagttattt

SEQ ID NO: 500 - RNA, 23 nt, synthetic construct
  misc_feature 1..23: note = Synthetic
  source 1..23: mol_type = other RNA
aataactactaaatacaaaaagt

SEQ ID NO: 501 - RNA, 23 nt, synthetic construct
  misc_feature 1..23: note = Synthetic
  source 1..23: mol_type = other RNA
gacttgaaaacagtttatttaat

SEQ ID NO: 502 - RNA, 23 nt, synthetic construct
  misc_feature 1..23: note = Synthetic
  source 1..23: mol_type = other RNA
tgacttgaaaacagtttatttaa

SEQ ID NO: 503 - protein, 355 aa, synthetic construct
  REGION 1..355: note = Synthetic
MPFLGQDWRSPGQNWVKTADGWKRFLDEKSGSFVSDLSSYCNKEVYNKENLFNSLNYDVAAKKRKKDMLNSKTKTQYFHQEKWIYVHKGSTKERHGYCTLGEAFNRLDFSTAILDSRRFNYVVRLLELIAKSQLTSLSGIAQKNFMNILEKVVLKVLEDQQNIRLIRELLQTLYTSLCTLVQRVGKSVLVGNINMWVYRMETILHWQQQLNNIQITRPAFKGLTFTDLPLCLQLNIMQRLSDGRDLVSLGQAAPDLHVLSEDRLLWKKLCQYHFSERQIRKRLILSDKGQLDWKKMYFKLVRCYPRKEQYGDTLQLCKHCHILSWKGTDHPCTANNPESCSVSLSPQDFINLFKF

SEQ ID NO: 504 - protein, 353 aa, Homo sapiens
MDYKSSLIQDGNPMENLEKQLICPICLEMFTKPVVILPCQHNLCRKCANDIFQAANPYWTSRGSSVSMSGGRFRCPTCRHEVIMDRHGVYGLQRNLLVENIIDIYKQECSSRPLQKGSHPMCKEHEDEKINIYCLTCEVPTCSMCKVFGIHKACEVAPLQSVFQGQKTELNNCISMLVAGNDRVQTIITQLEDSRRVTKENSHQVKEELSQKFDTLYAILDEKKSELLQRITQEQEKKLSFIEALIQQYQEQLDKSTKLVETAIQSLDEPGGATFLLTAKQLIKSIVEASKGCQLGKTEQGFENMDFFTLDLEHIADALRAIDFGTDEEEEEFIEEEDQEEEESTEGKEEGHQ

SEQ ID NO: 505 - DNA, 6744 bp, Homo sapiens
  source 1..6744: mol_type = genomic DNA
agcactcccggagcctgcaacgcttgagatcctctccgcgcccgccaccccgcagggtgccccgcgccgttcccgccgccccgccgcccccgtcgcgggcccctgcaccccgagcatccgccccgggtggcacgtccccgagcccaccaggccggccccgtctccccatccgtctagtccgctcgcggtgccatgccattcctcgggcaggactggcggtcccccgggcagaactgggtgaagacggccgacggctggaagcgcttcctggatgagaagagcggcagtttcgtgagcgacctcagcagttactgcaacaaggaggtatacaataaggagaatcttttcaacagcctgaactatgatgttgcagccaagaagagaaagaaggacatgctgaatagcaaaaccaaaactcagtatttccaccaagaaaaatggatctatgttcacaaaggaagtactaaagagcgccatggatattgcaccctgggggaagctttcaacagactggacttctcaactgccattctggattccagaagatttaactacgtggtccggctgttggagctgatagcaaagtcacagctcacatccctgagtggcatcgcccaaaagaacttcatgaatattttggaaaaagtggtactgaaagtccttgaagaccagcaaaacattagactaataagggaactactccagaccctctacacatccttatgtacactggtccaaagagtcggcaagtctgtgctggtcgggaacattaacatgtgggtgtatcggatggagacgattctccactggcagcagcagctgaacaacattcagatcaccaggcctgccttcaaaggcctcaccttcactgacctgcctttgtgcctacaactgaacatcatgcagaggctgagcgacgggcgggacctggtcagcctgggccaggctgcccccgacctgcacgtgctcagcgaagaccggctgctgtggaagaaactctgccagtaccacttctccgagcggcagatccgcaaacgattaattctgtcagacaaagggcagctggattggaagaagatgtatttcaaacttgtccgatgttacccaaggaaagagcagtatggagatacccttcagctctgcaaacactgtcacatcctttcctggaagggcactgaccatccgtgcactgccaataacccagagagctgctccgtttcactttcaccccaggactttatcaacttgttcaagttctgaatcccagcacatgacaacacttcagaagggtccccctgctgactggagagctgggaatatggcatttggacacttcatttgtaaatagtgtacattttaaacattggctcgaaacttcagagataagtcatggagaggacattggaggggagaaatgcagttgctgactgggaatttaagaatgtgaacttctcactagaattggtatggaaaagcaaaatactgtaaataaactttttttctaacaatttgccagcaagactataagggcaataattctatttcagcggtgaaaatggagtcctcttaatggtcacagaaactctcttatagttccctaggaagaaaaaggcaaaactcaaatacaaaataggacgctttgtttacaatgtgaaaatttgtttagaaaagaaaaaatgaagaaggaaaactatataggagaaattcctgggctttggggtttgatctggtgtttgttttgagaaggcgaaggaagcgccacccatcctaaacctgcatgggcacagagccttaccctacagagataccacacaatggtctacctctaaaagcgtagagtgccctctctgacaacgcatgtgatccagtaggcagtgtctgtttttctcgtaagtgttttcatcactataaaaagtgatttaaaatggaaagggatattggaggcaatcctctggtttcacacttccttttcaggcaaacagggccctccttagagttatctgttcaccagaacaacccaaaagcacatgttccttttttcctgtcatgttgtagctcatttgggggaaaagaaggccaacttaaaacagtcccaggggaggattgcttgagcccaggagtctgaggtttgcagtgagctatgattgtgccactgcactccagcctgtctccaaaacaaaacaaaacaaaacaaaagccgtcccagaggaagtcctgctgcagaaaagatgatagaattggtcacccaatcaatagctgtgaagacttccttattcctgctgaacttccttccttggatatcttcatggataagcctgtgtctgtggacagagtggggcccaagtgctgaggctcgaaagacaggttttacaatcagccaattaaacatcttaccagttgctgtaccccttgccaaggggatgagctgaggagcttcttttctttaggtccaacatcaaaatgagtccatctgagctagggctttttgcaaaggtgattaaaaatcaaggctggagttccagccaaatagggaggagaggtaccacaagttcatcttaaacttgcttccgggctgggtagttaaaacaggaagatcccaaggggatcttacgaggcaaatatcagcaggtaactgtggaagaaaggaaatctcaggacctaatgagttcgttgtaaaatattcctgggaatagatgggggatctactcccagttttttactttttacagaatattgttgctttcctacaacaatgtacatatatttgcagttgtatatgctttttttttttccaaataaacttgtcaccctgcatgcccttggcaaataagtgaagcagaaataggaacacagtccacattcaagttgaggaacagtgtatctttaagagctgagctttgggtgacctggaaagggggaaagatggctaagcatggagagaaacgaggcaagagacaagctatgatacaacaccgcttcagcccctgccctcaatagcacacaacccacatatcagctttctgaagagaaggaacctactgtttagtgctcctcactttgcaatgtttgtgctacgccagaatttctccagtttttttcattatcatccccctgagaaaaaaattacattgaatttaaattttccctaataagagaaattaaatatgaaagaataggattttgttgggtaagattgagctttggaaggtcacgaaccattattctatctaaggtgtgtgttttgttttgtttttttttgttttttttttgcaatccctctccccctgaaccaatttcacattgggaatgcaggacctagactgctgaataaaaagctacttcttctataattgtcaggttctctccaatttctcagcttcctcaaagacatggggtggagttgggtgtgccatcactgagagagctctggaacttttgactcttagtgacatttttagatttaggggttcatggccttccacatgttgccaccaactggtgatctctgccccttcatgctgatcaagaaagtagaaactcctcgtcgccttcaggtttgcagtcgcagaaacattgcctgctgtggactgtcagcacaaaactgggacactggtgtcatttagactgtcagcagtgcacatgattgtacgatagactccaggcaaccatgtgcatctgtgcaagatgacctctgccccaagagaagggttacggtctaattaaatgtttaccaagatggtaccagtgggctctccccgtgtcctttggtgttattggagctggtgtatgacagactcaaggaaattttttaaggaaaatgaagaagaaatcaacctttatggttctctttcattggaagaggagaataaggaaagaaatggcaggtagagagggagggggaaaggaatagaaatggcatgtctttgatgctgtggcttgtgtggggacaatgggaagagcacagcaggcacaacatatctgtgttagtgccacgtggtatctgttaagtatggccagagcctcacatataagtgaagagagttaagacaattcttgctctttgaacaataatagtctatagaatttctattggcaaaccatcccagacaacctgacctatcaaacaaaagcaaataatccctgtctcagaactgctggtctaaaagctagaaggggcatgataatggaaattgctagaaaagagagaatgctctactctctttcctgtgcctacctacccccatcctaaaccctgtaaaacagaatttcaaaatagatgtcaaatatgaagtaattcagacttccaaagaaggaaagagttctgcccagggcagtatgagcaaatccacagggatgttaagatttggtccaactcaaaggtttatgggcagtgagcctagagtctcttgagagtaaacccttgcatttgggacaaggagaatatgtgaagttcaggagtgctcacactagagcaagatccagaaaaaaaaaaatccaatggcattttaaactagattgcattatcactcaatgctgttactttgagcagacaaatcagttgaatgggagggcaaatggcagaaatgaacaaaagctattaggtgaaagcatccccaatgtatcagttgtgagatgatttttgtttaatgatgatcaggtttacattgaagtggcttggaagacgtatttcagagggactgggtttgtactgcaaaactctgaacactagagcaggttctactagcacttgggcagtaaggtagcgggtgtgtattatgctattgccatagttctcgtctttgtggattcacataccctttcccatgaggagcttgctactaacagcctcctgtttctgttgtttttatatgggagaagagaaagagcttggaatttcaattgtctaaacaattggtatgatttacaagaaggcaaaccattcaggagatgttcaacagtgtatcattcttagcattcaatacaatgtttattataaaatatacacctgagtttatgtttttctgccaggctgaagggcaataatgtcttgctatgcaaacactctattttatgtgtgaatttttttaactgtaattttatgtgtgaatttttttaactaaactctatcatcattttctatgttgacatcttttttttttttttaatctgtttccaactctgagtctgtgaactatctcttctgactggatgctggcctaaaatcctattagtgcttaaacagacctcaaaacactctgaacctgtaggccaatacagagatgttgttctttgatatatcttgggtccttgatggcttcaacaaacaaggtcataatttgtttaaattcagtgttttctgtagataccttcttctcagtttcattaagaagagtaaccatctttggttttccaaagaatggaaactcctaccctagactttagacttagagcgtctgcctttcacgatgagtaagagatccagaatgtttaggggatgtgcgtcagcccacctggtacagtggcaaagctgaatgcgaacttgaggcctcctgaggcctgaccttctatgcccccagccctccaccccaagcaccttttggtgtggctggaaacacatgacattggatgtgatttttctcaagcccttcactgtggaaggcatgggagactgcccagcattgggcatgtggctgttaacgtttccatttcaagtccctgattcttactggagaagttaaggagccacttaatgttttcacagacctctgattctgttgtgaatgtggcattccagtgagtacaacctgcttgctataaagaaagcagcatattttgacaattttatttcttccttgggtacttacatttttattacaaaaatggccgttataaaaaaagacagaagggctgggcagtggcttgctccctagaaactgagattccgaagcaggtgtttcctctcccctagactcagaggtacatttaatccatcttctccatttcctccttcaggaccagctatgagattcagtgcatttctagcccagcggatgttcattctccactaaacttcatcttttactaagcaaagggggattattccatgaggcagccaggagcaaggggccatgatattcatgactttgtctgctgggcatttttcaaagtgtccttgaattcactcagcaaacaaagctttctggagaatctctcaaaacttaggccctgctccatttggccaaaaatgatggctgctccaaaactctgaacttcttaaaactccatctgctacattatttctggagtttaaacatgactttttctgtctttgagtatagatgtgtttgtttaattaacgaagcacaagtctgttaagcagaaggctccaagctgtattctatacttgggaatccttggtgccatctttattctaccaagtgccaatcaccatggctaaagtgggcgtatattacagcctgtgtcctaagcttagaagctttaatgtacttttttaaatgaaaagtattagagggggttgaacattgtaactaaagcataaagttagaccaattacatgcagagatgtttatttaatattgtgtgagctgagtccttctgtataaattatttgcacacttttcttgcatgatgaactgattttttatagttgtttgtaccagacggtggcatatttttgtaaaaaacttttgacactgaattgcaataaatgtttttccaacaaca

SEQ ID NO: 506 - DNA, 6936 bp, Mus musculus
  source 1..6936: mol_type = genomic DNA
gacggggcagcggcccgggataaatactgcgctcgggcagccgctcagcattcccagagtcaggaggcgaccttccccaacgcctgcgcccctgtgagtgcaaggatccccgcgcccacccaggatccgcagccctccacactagttgacccactcttgtcccggtcgccgcctgcgtcgttccccagcatcttcccaacgcgccgcataccctgggcaagccaggccggttcctggctgtcaatccgtcccgtccgtcggtcgcgtccgcgctctgtaccatgccgttccttgggcaggactggcggtccccgggccagagctgggtgaagacggcggacggctggaagcgcttcttggatgagaaaagcggcagcttcgtgagcgacctcagcagttactgcaacaaggaggtatacagtaaggagaatctgttcagcagcctgaactacgacgtcgcagccaagaagagaaagaaagacattcagaacagcaaaaccaaaactcagtacttccatcaagaaaagtggatctatgttcacaaaggaagtacgaaggagcgccatggatactgtactttgggggaagctttcaacagactggacttctcgactgccatcctggattccagaagattcaactacgtagtaaggctgttggagctgatagcaaagtcacagctcacatccctgagtggcatcgcccaaaagaacttcatgaacattttggaaaaagtggtactgaaagttcttgaagaccagcaaaacataagacttatacgggaacttctccagactctctacacatccttatgcacactggtgcagagagtcggcaagtctgtgctggtgggcaacattaacatgtgggtgtatcggatggagaccattctacactggcagcagcagctgaatagcatccagatcagcaggcctgccttcaaaggcctcacgatcaccgacctgcctgtgtgcttacaactgaacatcatgcagaggctgagtgacgggcgggacctggtcagcctgggccaggcagccccagacctgcatgtgctcagtgaggaccggctactgtggaagagactctgccagtaccacttctcagagaggcagattcgcaagcgtttgatcttgtctgacaaagggcagctggattggaagaagatgtattttaagcttgtacgatgttacccaagaagagagcagtatggggtcaccctgcagctttgcaaacactgccacattctctcctggaagggcactgaccatccgtgcacggccaacaacccagagagctgctccgtctcactttcccctcaagactttatcaatttgttcaagttctgaataatcccagcacacgacaacacttcagaaggcttctaattggatggctgggagtcgggacacttcatttgtaaatagtgtacattttaagcattggcttgaaactgcgggggatacgtcattgaggagacgttggcggggaagagatgcagttgccgatggaaatttacaaatgtgaattccacatgagaactggtacagaaaagcagaaatactgtaaatagactttttattttccctaacgatttgcaagcaagactataaaggcaagaactctatgtcagccatggaaacggagtcctcttgagttccctaggaagaaaaaggcaaaaagctcaaaaacaagatggaacactctgtttacaatgtgaaaatgttgttaagacaaaaataaggaagaaggaagatgaacgctgtcattgagaaacccttgggctttgggtttggattcggggtttgttttcagcaggccaagaagtatatccacctgaaatctgcacgggcttaagtccttatcctatgaagatgccacacaatggtctacctctaaaagcatagcgtgttctctggcaacatactttatctgggaggcaatgtctgtgtttcatgtaagttctatactctgtgaagtgatctaagatgggaaggctgttaggaaaaaaaaaaaaagccctctcttggttctgacttcctgtccccccagtccctctcagtccctgcacctcttctcctttcatgttgtcactcctgtagggaaccgggaggccagctaaagaacagcagaagtcatgaagagagaattaggcacctgtgcatgctcagaactttccatttaactcttccttcttctagcctgacttctaggcttgtccgggcttccttgagtgtcttcatggataagtggatgtctgggaccttaggagagcccaagaactgaggcttgagagacacagtttctcacactagccagttaaacattctgccagctgctgtttcccctcggcaggccaatgagctgaggcactgtctgttctgtaggcccagcatccaactcaagtcaccctgaaccgggactttttcacaagcatgatttcaaagaaagcctgatagatgtgttcgtcttaaacttgtttcaggactgagttagagcaaagataaagagtcccgggggttcttgtgagacagagacatgaacactgtggaagaaaggagaaggagatctcagggcttaaggagttaattcctggggtgggggaaatgtttttatattttactttttacagattgttgcttttctacaatgtacatatatttgcaattgtatttgctgttttttttttaaatctccaaataaaattgccactatgcatgctcttggcaaacaagcagaaataggaatttgttccatgtaaatgttaaggtgtggtgtgacctgaagcattgatgcgtggggtagtcctaggaggagaggaaagatggctgagcgtgaacaagaacaaggccggggcagtgaacacttcttccttcagtcgtagagcaccctcgggttggtactgtacaggcggatggagtctgtggggctccctgatttgcagggtcttacatctgtgcttacaccagaagttctccatgttttctttatcagcaccatctcctggtggccaaattaagttgaatttaaaggttcgtaatgagaaaagggatgtgtaaaagaacaagatttcttttacatggaaaagttaaaagtctaaagctgaaccttggagattacaaacattgtaacagagaagagtttcctgtttgctttgggatttttgaaatcttctccccagaaacaattttacattaagaatgtagggccttggggctggagaggtggctcagcagttaagagcactgactgctcttctgaaggtcctgagttcaattcctagcaaccacatggtggctcataaccatccataatgagatctgatggcctcttctggtgagtctgaagacagctacagtgtacttacatataataaataaataaataaataaataaataaataaataaataaataaataaatctatctttaaaagaaaaagaatgtaggacctaggtggaaggaaggaaggaaggaaggaaggaagcaaggaaggaaggaaagcaggcaggcctgccgccacagtgattctgagtgacagtgttgaggttaggggatcgtggcctttcacatgtcctcagcctgctctgtggtgcttttcagagatgggaacttgtagggaccttggggtttacaggtccgtcaactttgccagctttgaactgccagcgcaaaactagttagccagtcttacagataggcagcagtacccaaagtcatatagcatccatacaccccaggcaacaatgtaaaatggcccttaccccaagcagcaagggcacagcttcttgaaatatttagtaggtgcttgcaggttctccatgacccttggtgtcattggatatggtatgtgacacaaccgaagaatcgtttgacggatgaagaagaggaaaggagcatgtattggtcgctgtcactggctggtagaaaacaggaaggatgtggaaggtggagagggagtgggagaggtgtagaaatgatgtatctttgatgctgtttagggtgggagcaacagagagaggagggcaagcaagatacccatattaggtcatggccagagcctcatattcaagtactgggagttaaaaagaaaagctcttaggacattaatagtctatagaattcttggcaaacccatgcaggactcccagacttaaaacacaaaacctaagaattcctgacccagaactgctagtacaaaagcaagaggggtgtggctatagaagttgctgagagaattgggactgtgtatctctctactggacctgactcccctcctttgcatgttgaaatgcagaactagagttatacccactttgaagtgattcagaatccagagaaggaaaagagttctgtccaagcaaaccaagggagatggtcactggtgactttactttggagcaatcagctgagagtctctgaatgagaaccatcgtgtgtgtgtgtgtgtgtgtgtgtgtgtgtgtgtgtgatacaactgaagtttaggaatgctccttttatagccagaatcagtaaaagaaaatctcactgtcactgtcagctagaccatgtcgctactaccattgcttcaagtgggtatctcagttgaacgggagggaaaaggtgacagacagaaaggaacagacattacacagtgggctctccagcccaccagctgagaggggctttctggttagtgatgatcaacttcaggtggcactggtttagaggagacatttttaagggacaaagtttccaccacaaaagctttcaacggaagagccgatctaattgtgaccatgaagccagctgatgggtgaccacacaaacccttccccgggaggcatttgctgttgacacaggctccttatttctgccgcttcatacgggagaaaaaaaaagagtgggactttgatttgtctaagcagttggtatgattcacagagagataaatcatcacaggagatggttagcagtgtatggttctcggcttcaacgcattgtttattataaaacatgcacctgggtttatatttttctgcctggttataaagcaataacatcttgctatgcaaacactaaatttcatgtgtgaattttcaactgtgattttatgtgtgcattttttaaactaaactctatcatttttctatgttgacatctgttgttggtttggttttgttttgtttttaatctgtttccaactatctgagtctgtgaaccatctctcctgactggatgctggcttgaaacctgttagtgcttaaacagactcagaaacaaccctggacctctggggcaaacgcaggggtgttactctttgatatatcatgggccctctgtggcttcaacaaacaaagtcataattcctctaaattctgtgttttctgtaaatattttcttcttctcagctctgctaaaatgggggtggggggggggggggagagagagaaactcctatcccagactttagaccaaaaggggttgttagagagtatggactctggcatttctgcatttgaagatgaggaagcctttccagaattgggggtacagaggctttctctgtgcttcctgggaggtcagcaagagggttgaacagaaacctgaagcttcctgatgccagagctcttgagcccacctctcccccagcaccttgtggacgtgtgtaaattcatgacacccactgtaatgcctcccaagatcttcactgtgggaggcatgggaggtgatcccatgatgggctcctgccacaaaatcttccaaaccttttaagtctgattcctgctggagaagttagagtccctctttcattttcataccctcttactctgctgtgagtgccacattcagctgagcaccacctgcttcctaagacgtaaccagtgtgctggggagatggctcagttgataaagtgcctgcagtgtaagtgtgaggacctgaattcaggttccagcatctgtgtaagagccaggcaggaacttaagtgcaaggcggggcaggggtggggataggttcattgaccaaccagtcttaagaatgaagtggtacccaggctcattgagagatcctgtctcaaaaaataaaaatggacagagatctagggatgcacccaacatctgccgcaacctcccaagtcatatgcgtgtgcacagaaatccccagatctttcttctcccctgaaatgcaaaggtacatttaaactatccatcctctttcttgcccgtcttttggcagtgagccctgccataacataagatccagtgaggagcagttcagccaggttggacagtgatccattctgttcatccttgtttgtaataagcagaatttatcctgtaaggcaaggggtggtgatagccataatttttgtcggctgggcttttttcaaagtgtccttgaattcagcaagcaaaccttctttgagaaagctctctaaacttagtctctctccatttggctggaaataatggatggccacatccaaactccaaatttctggatgtgtcatatgcctcagcactacagaatctgactctctctttgagtatagacatgcgtgttaactatgcacagggctgtttaacagatggctccaatccctgctccatacttgggagcctttggttccatctttataccaaatgccaatcacactggctacagagagtgtattatagtctgtgtctaagcttagaagctttaaatgtatgttttaaagaaaaaatactagagtgggttgaacactttaactaaacttggaaggttggacagattatgtgcaaagatgattgtttgtttaataatgaataatctgaatcctgtataacttatttgcacacctttcttgcatgatgaactgacatttttatagttgtttgtataagacagtggcatatttttgtaaacatttttttgacactgaacttcaataaatgtttttcctacaacaca

SEQ ID NO: 507 - DNA, 19 bp, synthetic construct
  misc_feature 1..19: note = Synthetic
  source 1..19: mol_type = other DNA
ctggattggaagaagatgt

SEQ ID NO: 508 - DNA, 19 bp, synthetic construct
  misc_feature 1..19: note = Synthetic
  source 1..19: mol_type = other DNA
aagggcagctggattggaa

SEQ ID NO: 509 - DNA, 19 bp, synthetic construct
  misc_feature 1..19: note = Synthetic
  source 1..19: mol_type = other DNA
tggattggaagaagatgta

SEQ ID NO: 510 - DNA, 19 bp, synthetic construct
  misc_feature 1..19: note = Synthetic
  source 1..19: mol_type = other DNA
agggcagctggattggaag

SEQ ID NO: 511 - DNA, 19 bp, synthetic construct
  misc_feature 1..19: note = Synthetic
  source 1..19: mol_type = other DNA
acaaagggcagctggattg

SEQ ID NO: 512 - DNA, 19 bp, synthetic construct
  misc_feature 1..19: note = Synthetic
  source 1..19: mol_type = other DNA
tcatcattttctatgttga

SEQ ID NO: 513 - DNA, 19 bp, synthetic construct
  misc_feature 1..19: note = Synthetic
  source 1..19: mol_type = other DNA
tggatatcttcatggataa

SEQ ID NO: 514 - DNA, 19 bp, synthetic construct
  misc_feature 1..19: note = Synthetic
  source 1..19: mol_type = other DNA
ctaaaatcctattagtgct

SEQ ID NO: 515 - DNA, 19 bp, synthetic construct
  misc_feature 1..19: note = Synthetic
  source 1..19: mol_type = other DNA
ggcctgccttcaaaggcct

SEQ ID NO: 516 - DNA, 19 bp, synthetic construct
  misc_feature 1..19: note = Synthetic
  source 1..19: mol_type = other DNA
gcaagactataagggcaat

SEQ ID NO: 517 - DNA, 19 bp, synthetic construct
  misc_feature 1..19: note = Synthetic
  source 1..19: mol_type = other DNA
ggcagatccgcaaacgatt

SEQ ID NO: 518 - DNA, 19 bp, synthetic construct
  misc_feature 1..19: note = Synthetic
  source 1..19: mol_type = other DNA
acttctcactagaattggt

SEQ ID NO: 519 - DNA, 19 bp, synthetic construct
  misc_feature 1..19: note = Synthetic
  source 1..19: mol_type = other DNA
tacatatatttgcagttgt

SEQ ID NO: 520 - DNA, 19 bp, synthetic construct
  misc_feature 1..19: note = Synthetic
  source 1..19: mol_type = other DNA
cttgggtccttgatggctt

SEQ ID NO: 521 - DNA, 19 bp, synthetic construct
  misc_feature 1..19: note = Synthetic
  source 1..19: mol_type = other DNA
cttggaatttcaattgtct

SEQ ID NO: 522 - DNA, 19 bp, synthetic construct
  misc_feature 1..19: note = Synthetic
  source 1..19: mol_type = other DNA
tgaaagttcttgaagacca

SEQ ID NO: 523 - DNA, 19 bp, synthetic construct
  misc_feature 1..19: note = Synthetic
  source 1..19: mol_type = other DNA
cctgtgtgcttacaactga

SEQ ID NO: 524 - DNA, 19 bp, synthetic construct
  misc_feature 1..19: note = Synthetic
  source 1..19: mol_type = other DNA
tgttggagctgatagcaaa

SEQ ID NO: 525 - DNA, 19 bp, synthetic construct
  misc_feature 1..19: note = Synthetic
  source 1..19: mol_type = other DNA
ctggattccagaagattca

SEQ ID NO: 526 - DNA, 19 bp, synthetic construct
  misc_feature 1..19: note = Synthetic
  source 1..19: mol_type = other DNA
ccagaagattcaactacgt

SEQ ID NO: 527 - DNA, 19 bp, synthetic construct
  misc_feature 1..19: note = Synthetic
  source 1..19: mol_type = other DNA
gcatcgcccaaaagaactt

SEQ ID NO: 528 - DNA, 19 bp, synthetic construct
  misc_feature 1..19: note = Synthetic
  source 1..19: mol_type = other DNA
cctggattccagaagattc

SEQ ID NO: 529 - DNA, 19 bp, synthetic construct
  misc_feature 1..19: note = Synthetic
  source 1..19: mol_type = other DNA
actgaaagttcttgaagac

SEQ ID NO: 530 - DNA, 19 bp, synthetic construct
  misc_feature 1..19: note = Synthetic
  source 1..19: mol_type = other DNA
aagagactctgccagtacc

SEQ ID NO: 531 - RNA, 21 nt, synthetic construct
  misc_feature 1..21: note = Synthetic
  source 1..21: mol_type = other RNA
agctggattggaagaagatgt

SEQ ID NO: 532 - RNA, 21 nt, synthetic construct
  misc_feature 1..21: note = Synthetic
  source 1..21: mol_type = other RNA
caaagggcagctggattggaa

SEQ ID NO: 533 - RNA, 21 nt, synthetic construct
  misc_feature 1..21: note = Synthetic
  source 1..21: mol_type = other RNA
gctggattggaagaagatgta

SEQ ID NO: 534 - RNA, 21 nt, synthetic construct
  misc_feature 1..21: note = Synthetic
  source 1..21: mol_type = other RNA
aaagggcagctggattggaag

SEQ ID NO: 535 - RNA, 21 nt, synthetic construct
  misc_feature 1..21: note = Synthetic
  source 1..21: mol_type = other RNA
agacaaagggcagctggattg

SEQ ID NO: 536 - RNA, 21 nt, synthetic construct
  misc_feature 1..21: note = Synthetic
  source 1..21: mol_type = other RNA
tatcatcattttctatgttga

SEQ ID NO: 537 - RNA, 21 nt, synthetic construct
  misc_feature 1..21: note = Synthetic
  source 1..21: mol_type = other RNA
cttggatatcttcatggataa

SEQ ID NO: 538 - RNA, 21 nt, synthetic construct
  misc_feature 1..21: note = Synthetic
  source 1..21: mol_type = other RNA
gcctaaaatcctattagtgct

SEQ ID NO: 539 - RNA, 21 nt, synthetic construct
  misc_feature 1..21: note = Synthetic
  source 1..21: mol_type = other RNA
caggcctgccttcaaaggcct

SEQ ID NO: 540 - RNA, 21 nt, synthetic construct
  misc_feature 1..21: note = Synthetic
  source 1..21: mol_type = other RNA
cagcaagactataagggcaat

SEQ ID NO: 541 - RNA, 21 nt, synthetic construct
  misc_feature 1..21: note = Synthetic
  source 1..21: mol_type = other RNA
gcggcagatccgcaaacgatt

SEQ ID NO: 542 - RNA, 21 nt, synthetic construct
  misc_feature 1..21: note = Synthetic
  source 1..21: mol_type = other RNA
gaacttctcactagaattggt

SEQ ID NO: 543 - RNA, 21 nt, synthetic construct
  misc_feature 1..21: note = Synthetic
  source 1..21: mol_type = other RNA
tgtacatatatttgcagttgt

SEQ ID NO: 544 - RNA, 21 nt, synthetic construct
  misc_feature 1..21: note = Synthetic
  source 1..21: mol_type = other RNA
atcttgggtccttgatggctt

SEQ ID NO: 545 - RNA, 21 nt, synthetic construct
  misc_feature 1..21: note = Synthetic
  source 1..21: mol_type = other RNA
agcttggaatttcaattgtct

SEQ ID NO: 546 - RNA, 21 nt, synthetic construct
  misc_feature 1..21: note = Synthetic
  source 1..21: mol_type = other RNA
actgaaagttcttgaagacca

SEQ ID NO: 547 - RNA, 21 nt, synthetic construct
  misc_feature 1..21: note = Synthetic
  source 1..21: mol_type = other RNA
tgcctgtgtgcttacaactga

SEQ ID NO: 548 - RNA, 21 nt, synthetic construct
  misc_feature 1..21: note = Synthetic
  source 1..21: mol_type = other RNA
gctgttggagctgatagcaaa

SEQ ID NO: 549 - RNA, 21 nt, synthetic construct
  misc_feature 1..21: note = Synthetic
  source 1..21: mol_type = other RNA
tcctggattccagaagattca

SEQ ID NO: 550 - RNA, 21 nt, synthetic construct
  misc_feature 1..21: note = Synthetic
  source 1..21: mol_type = other RNA
ttccagaagattcaactacgt

SEQ ID NO: 551 - RNA, 21 nt, synthetic construct
  misc_feature 1..21: note = Synthetic
  source 1..21: mol_type = other RNA
tggcatcgcccaaaagaactt

SEQ ID NO: 552 - RNA, 21 nt, synthetic construct
  misc_feature 1..21: note = Synthetic
  source 1..21: mol_type = other RNA
atcctggattccagaagattc

SEQ ID NO: 553 - RNA, 21 nt, synthetic construct
  misc_feature 1..21: note = Synthetic
  source 1..21: mol_type = other RNA
gtactgaaagttcttgaagac

SEQ ID NO: 554 - RNA, 21 nt, synthetic construct
  misc_feature 1..21: note = Synthetic
  source 1..21: mol_type = other RNA
ggaagagactctgccagtacc

SEQ ID NO: 555 - RNA, 23 nt, synthetic construct
  misc_feature 1..23: note = Synthetic
  source 1..23: mol_type = other RNA
acatcttcttccaatccagctgc

SEQ ID NO: 556 - RNA, 23 nt, synthetic construct
  misc_feature 1..23: note = Synthetic
  source 1..23: mol_type = other RNA
ttccaatccagctgccctttgtc

SEQ ID NO: 557 - RNA, 23 nt, synthetic construct
  misc_feature 1..23: note = Synthetic
  source 1..23: mol_type = other RNA
tacatcttcttccaatccagctg

SEQ ID NO: 558 - RNA, 23 nt, synthetic construct
  misc_feature 1..23: note = Synthetic
  source 1..23: mol_type = other RNA
cttccaatccagctgccctttgt

SEQ ID NO: 559 - RNA, 23 nt, synthetic construct
  misc_feature 1..23: note = Synthetic
  source 1..23: mol_type = other RNA
caatccagctgccctttgtctga

SEQ ID NO: 560 - RNA, 23 nt, synthetic construct
  misc_feature 1..23: note = Synthetic
  source 1..23: mol_type = other RNA
tcaacatagaaaatgatgataga

SEQ ID NO: 561 - RNA, 23 nt, synthetic construct
  misc_feature 1..23: note = Synthetic
  source 1..23: mol_type = other RNA
ttatccatgaagatatccaagga

SEQ ID NO: 562 - RNA, 23 nt, synthetic construct
  misc_feature 1..23: note = Synthetic
  source 1..23: mol_type = other RNA
agcactaataggattttaggcca

SEQ ID NO: 563 - RNA, 23 nt, synthetic construct
  misc_feature 1..23: note = Synthetic
  source 1..23: mol_type = other RNA
aggcctttgaaggcaggcctggt

SEQ ID NO: 564 - RNA, 23 nt, synthetic construct
  misc_feature 1..23: note = Synthetic
  source 1..23: mol_type = other RNA
attgcccttatagtcttgctggc

SEQ ID NO: 565 - RNA, 23 nt, synthetic construct
  misc_feature 1..23: note = Synthetic
  source 1..23: mol_type = other RNA
aatcgtttgcggatctgccgctc

SEQ ID NO: 566 - RNA, 23 nt, synthetic construct
  misc_feature 1..23: note = Synthetic
  source 1..23: mol_type = other RNA
accaattctagtgagaagttcac

SEQ ID NO: 567 - RNA, 23 nt, synthetic construct
  misc_feature 1..23: note = Synthetic
  source 1..23: mol_type = other RNA
acaactgcaaatatatgtacatt

SEQ ID NO: 568 - RNA, 23 nt, synthetic construct
  misc_feature 1..23: note = Synthetic
  source 1..23: mol_type = other RNA
aagccatcaaggacccaagatat

SEQ ID NO: 569 - RNA, 23 nt, synthetic construct
  misc_feature 1..23: note = Synthetic
  source 1..23: mol_type = other RNA
agacaattgaaattccaagctct

SEQ ID NO: 570 - RNA, 23 nt, synthetic construct
  misc_feature 1..23: note = Synthetic
  source 1..23: mol_type = other RNA
tggtcttcaagaactttcagtac

SEQ ID NO: 571 - RNA, 23 nt, synthetic construct
  misc_feature 1..23: note = Synthetic
  source 1..23: mol_type = other RNA
tcagttgtaagcacacaggcagg

SEQ ID NO: 572 - RNA, 23 nt, synthetic construct
  misc_feature 1..23: note = Synthetic
  source 1..23: mol_type = other RNA
tttgctatcagctccaacagcct

SEQ ID NO: 573 - RNA, 23 nt, synthetic construct
  misc_feature 1..23: note = Synthetic
  source 1..23: mol_type = other RNA
tgaatcttctggaatccaggatg

SEQ ID NO: 574 - RNA, 23 nt, synthetic construct
  misc_feature 1..23: note = Synthetic
  source 1..23: mol_type = other RNA
acgtagttgaatcttctggaatc

SEQ ID NO: 575 - RNA, 23 nt, synthetic construct
  misc_feature 1..23: note = Synthetic
  source 1..23: mol_type = other RNA
aagttcttttgggcgatgccact

SEQ ID NO: 576 - RNA, 23 nt, synthetic construct
  misc_feature 1..23: note = Synthetic
  source 1..23: mol_type = other RNA
gaatcttctggaatccaggatgg

SEQ ID NO: 577 - RNA, 23 nt, synthetic construct
  misc_feature 1..23: note = Synthetic
  source 1..23: mol_type = other RNA
gtcttcaagaactttcagtacca

SEQ ID NO: 578 - RNA, 23 nt, synthetic construct
  misc_feature 1..23: note = Synthetic
  source 1..23: mol_type = other RNA
ggtactggcagagtctcttccac

SEQ ID NO: 579 - DNA, 1771 bp, Homo sapiens
  source 1..1771: mol_type = genomic DNA
agacagaattcgggcaccaggagaaggaagccaacaggatccgacccggtgttttgtgacaaaggcaagacccccaggtctacttagagcaaagttagtagaggaggcagctaggcgtggctctcattccttcccacagaatggattataagtcgagcctgatccaggatgggaatcccatggagaacttggagaagcagctgatctgccctatctgcctggagatgtttaccaagccagtggtcatcttgccgtgccagcacaacctgtgccggaagtgtgccaatgacatcttccaggctgcaaatccctactggaccagccggggcagctcagtgtccatgtctggaggccgtttccgctgccccacctgccgccacgaggtgatcatggatcgtcacggagtgtacggcctgcagaggaacctgctggtggagaacatcatcgacatctacaaacaggagtgctccagtcggccgctgcagaagggcagtcaccccatgtgcaaggagcacgaagatgagaaaatcaacatctactgtctcacgtgtgaggtgcccacctgctccatgtgcaaggtgtttgggatccacaaggcctgcgaggtggccccattgcagagtgtcttccagggacaaaagactgaactgaataactgtatctccatgctggtggcggggaatgaccgtgtgcagaccatcatcactcagctggaggattcccgtcgagtgaccaaggagaacagtcaccaggtaaaggaagagctgagccagaagtttgacacgttgtatgccatcctggatgagaagaaaagtgagttgctgcagcggatcacgcaggagcaggagaaaaagcttagcttcatcgaggccctcatccagcagtaccaggagcagctggacaagtccacaaagctggtggaaactgccatccagtccctggacgagcctgggggagccaccttcctcttgactgccaagcaactcatcaaaagcattgtggaagcttccaagggctgccagctggggaagacagagcagggctttgagaacatggacttctttactttggatttagagcacatagcagacgccctgagagccattgactttgggacagatgaggaagaggaagaattcattgaagaagaagatcaggaagaggaagagtccacagaagggaaggaagaaggacaccagtaaggagctggatgaatgagaggcccccagatgcagagagactggagagggtggggaggggcccagcggccttggtgacaggcccagggtgggaggggtcggggcccctggaggggcaatggggaggtgatgtcttctctctgctcagagagcagggactagggtaggaccctcaccgctgcgtccagcagacactgaaccagaattggaaacgtgcttgaaacaatcacacaggacacttttctacattggtgcaaaatggaatattttgtacatttttaaaatgtgatttttgtatatacttgtatatgtatgccaatttggtgctttttgtaaaggaacttttgtataataatgcctggtcgttgggtgacctgcgattgtcagaaagaggggaaggaagccaggttgatacagctgcccacttcctttcctgagcaggaggatggggtagcactcacagggacgatgtgctgtatttcagtgcctatcccagacatacggggtggtaactgagtttgtgttatatgttgttttaataaatgcacaatgctctcttcctgttcttcaaa

SEQ ID NO: 580 - DNA, 1886 bp, Mus musculus
  source 1..1886: mol_type = genomic DNA
agaagtcgggggtcaggggacgaagacaaagaggatccgagtgggtttggagacaaagacttggtgtgacgcaggtgggcgagacagtcgcatttcaaagcaatatggattataaatctagcctgattcctgatggaaacgctatggagaacctggagaagcagctgatctgccccatctgcctggagatgtttaccaagcctgtggtcatcctgccctgccaacacaacctctgccggaagtgtgccaacgacatcttccaggctgcgaatccctactggaccaaccgcggtggctcagtgtccatgtctggaggtcgtttccgttgcccctcgtgccgccatgaagtgatcatggaccggcacggggtgtacggcctgcagaggaacctgctggtggaaaacatcattgacatctacaagcaggagtgctccagtcggcccctgcagaaaggcagccacccgatgtgcaaggaacacgaagacgagaaaatcaacatctactgtctcacgtgtgaggtgcctacttgctccttgtgcaaggtgtttggggctcaccaggcctgtgaggttgcccctttgcaaagcatcttccaaggacagaagactgagctgagtaactgcatctccatgctggtggcgggcaacgaccgagtgcagacgatcatctctcagctggaggactcctgcagagtgaccaaggagaatagccaccaggtgaaggaggagctgagtcagaagtttgacaccctctacgccatcctggacgagaagaagagcgagctgctgcagcggatcacgcaggagcaggaggagaagctgggcttcatcgaggctctgatcctccagtacagggagcagctggaaaagtccaccaaacttgtggagaccgccatccagtccctggatgagcccggaggggctaccttcctctcaagtgccaagcagctcatcaagagcattgtagaagcctccaagggctgccagctggggaagacagagcaaggctttgagaacatggactactttactctggacttagaacacatagcagaggccttgagggccattgactttgggacagatgaggaggaggaggaggaggagtttacagaagaggaggctgatgaggaagagggcgtgaccacagagggtaaagaagaacaccaatgaagaaggagatgagtgagacacgctctggacgcagagacgggggaggtgggggcaggcccatctcgggagggggttagggctccttggggggtacaatagggaagtgtgtcttctctctgctcagagagcagggactagcatagggctccccaccactgtgtccagcagctgctgaaacacaattggaaatgtatccaaaacgtcacaggacacttttctacgttggtgcgaaatgaaatattttgtatgtttttaaaatgtgatttttgtatatacttgtatatgtatgccaatttggtgctttttgtacgagaacttttgtatgatcacgcctggtcattgtgtgactggcgattgtcacaaagtgggaaggaagccaagacaatagagatgcctacttcctttccttggtgggagggctgggtctcactcggtggcctagagaggggcaatgtactgtacagtgcccatccccaaacatggggataggactgaatttgtgttatatgttgttttgcacaaggggctgggccttggggcacacaccctttgatcccagcactctggaggcagaggcagttggatctctatgagttcaaggccagcctggtctacatggagagttacaggccagccagagctacatagagagactctgcctcaaaaataaaaatgaaaaagaataaaaaataaactcacaatgctcttttcctg

SEQ ID NO: 581 - DNA, 19 bp, synthetic construct
  misc_feature 1..19: note = Synthetic
  source 1..19: mol_type = other DNA
tatgtatgccaatttggtg

SEQ ID NO: 582 - DNA, 19 bp, synthetic construct
  misc_feature 1..19: note = Synthetic
  source 1..19: mol_type = other DNA
aacatctactgtctcacgt

SEQ ID NO: 583 - DNA, 19 bp, synthetic construct
  misc_feature 1..19: note = Synthetic
  source 1..19: mol_type = other DNA
tatatgtatgccaatttgg

SEQ ID NO: 584 - DNA, 19 bp, synthetic construct
  misc_feature 1..19: note = Synthetic
  source 1..19: mol_type = other DNA
agtttgtgttatatgttgt

SEQ ID NO: 585 - DNA, 19 bp, synthetic construct
  misc_feature 1..19: note = Synthetic
  source 1..19: mol_type = other DNA
aaaggaacttttgtataat

SEQ ID NO: 586 - DNA, 19 bp, synthetic construct
  misc_feature 1..19: note = Synthetic
  source 1..19: mol_type = other DNA
aataaatgcacaatgctct

SEQ ID NO: 587 - DNA, 19 bp, synthetic construct
  misc_feature 1..19: note = Synthetic
  source 1..19: mol_type = other DNA
agaatggattataagtcga

SEQ ID NO: 588 - DNA, 19 bp, synthetic construct
  misc_feature 1..19: note = Synthetic
  source 1..19: mol_type = other DNA
gcctgatccaggatgggaa

SEQ ID NO: 589 - DNA, 19 bp, synthetic construct
  misc_feature 1..19: note = Synthetic
  source 1..19: mol_type = other DNA
gagcaaagttagtagagga

SEQ ID NO: 590 - DNA, 19 bp, synthetic construct
  misc_feature 1..19: note = Synthetic
  source 1..19: mol_type = other DNA
gcaaggtgtttgggatcca

SEQ ID NO: 591 - DNA, 19 bp, synthetic construct
  misc_feature 1..19: note = Synthetic
  source 1..19: mol_type = other DNA
accaggtaaaggaagagct

SEQ ID NO: 592 - DNA, 19 bp, synthetic construct
  misc_feature 1..19: note = Synthetic
  source 1..19: mol_type = other DNA
agcagacactgaaccagaa

SEQ ID NO: 593 - DNA, 19 bp, synthetic construct
  misc_feature 1..19: note = Synthetic
  source 1..19: mol_type = other DNA
gctccatgtgcaaggtgtt

SEQ ID NO: 594 - DNA, 19 bp, synthetic construct
  misc_feature 1..19: note = Synthetic
  source 1..19: mol_type = other DNA
aatttgtgttatatgttgt

SEQ ID NO: 595 - DNA, 19 bp, synthetic construct
  misc_feature 1..19: note = Synthetic
  source 1..19: mol_type = other DNA
gactgaatttgtgttatat

SEQ ID NO: 596 - DNA, 19 bp, synthetic construct
  misc_feature 1..19: note = Synthetic
  source 1..19: mol_type = other DNA
cctacttgctccttgtgca

SEQ ID NO: 597 - DNA, 19 bp, synthetic construct
  misc_feature 1..19: note = Synthetic
  source 1..19: mol_type = other DNA
gcaaggaacacgaagacga

SEQ ID NO: 598 - DNA, 19 bp, synthetic construct
  misc_feature 1..19: note = Synthetic
  source 1..19: mol_type = other DNA
ttgagaacatggactactt

SEQ ID NO: 599 - DNA, 19 bp, synthetic construct
  misc_feature 1..19: note = Synthetic
  source 1..19: mol_type = other DNA
aggactgaatttgtgttat

SEQ ID NO: 600 - DNA, 19 bp, synthetic construct
  misc_feature 1..19: note = Synthetic
  source 1..19: mol_type = other DNA
cttgctccttgtgcaaggt

SEQ ID NO: 601 - DNA, 19 bp, synthetic construct
  misc_feature 1..19: note = Synthetic
  source 1..19: mol_type = other DNA
cggaagtgtgccaacgaca

SEQ ID NO: 602 - DNA, 19 bp, synthetic construct
  misc_feature 1..19: note = Synthetic
  source 1..19: mol_type = other DNA
tcaacatctactgtctcac

SEQ ID NO: 603 - DNA, 19 bp, synthetic construct
  misc_feature 1..19: note = Synthetic
  source 1..19: mol_type = other DNA
tcaagagcattgtagaagc

SEQ ID NO: 604 - DNA, 19 bp, synthetic construct
  misc_feature 1..19: note = Synthetic
  source 1..19: mol_type = other DNA
acttgtatatgtatgccaa

SEQ ID NO: 605 - RNA, 21 nt, synthetic construct
  misc_feature 1..21: note = Synthetic
  source 1..21: mol_type = other RNA
tatatgtatgccaatttggtg

SEQ ID NO: 606 - RNA, 21 nt, synthetic construct
  misc_feature 1..21: note = Synthetic
  source 1..21: mol_type = other RNA
tcaacatctactgtctcacgt

SEQ ID NO: 607 - RNA, 21 nt, synthetic construct
  misc_feature 1..21: note = Synthetic
  source 1..21: mol_type = other RNA
tgtatatgtatgccaatttgg

SEQ ID NO: 608 - RNA, 21 nt, synthetic construct
  misc_feature 1..21: note = Synthetic
  source 1..21: mol_type = other RNA
tgagtttgtgttatatgttgt

SEQ ID NO: 609 - RNA, 21 nt, synthetic construct
  misc_feature 1..21: note = Synthetic
  source 1..21: mol_type = other RNA
gtaaaggaacttttgtataat

SEQ ID NO: 610 - RNA, 21 nt, synthetic construct
  misc_feature 1..21: note = Synthetic
  source 1..21: mol_type = other RNA
ttaataaatgcacaatgctct

SEQ ID NO: 611 - RNA, 21 nt, synthetic construct
  misc_feature 1..21: note = Synthetic
  source 1..21: mol_type = other RNA
acagaatggattataagtcga

SEQ ID NO: 612 - RNA, 21 nt, synthetic construct
  misc_feature 1..21: note = Synthetic
  source 1..21: mol_type = other RNA
gagcctgatccaggatgggaa

SEQ ID NO: 613 - RNA, 21 nt, synthetic construct
  misc_feature 1..21: note = Synthetic
  source 1..21: mol_type = other RNA
tagagcaaagttagtagagga

SEQ ID NO: 614 - RNA, 21 nt, synthetic construct
  misc_feature 1..21: note = Synthetic
  source 1..21: mol_type = other RNA
gtgcaaggtgtttgggatcca

SEQ ID NO: 615 - RNA, 21 nt, synthetic construct
  misc_feature 1..21: note = Synthetic
  source 1..21: mol_type = other RNA
tcaccaggtaaaggaagagct

SEQ ID NO: 616 - RNA, 21 nt, synthetic construct
  misc_feature 1..21: note = Synthetic
  source 1..21: mol_type = other RNA
ccagcagacactgaaccagaa

SEQ ID NO: 617 - RNA, 21 nt, synthetic construct
  misc_feature 1..21: note = Synthetic
  source 1..21: mol_type = other RNA
ctgctccatgtgcaaggtgtt

SEQ ID NO: 618 - RNA, 21 nt, synthetic construct
  misc_feature 1..21: note = Synthetic
  source 1..21: mol_type = other RNA
tgaatttgtgttatatgttgt

SEQ ID NO: 619 - RNA, 21 nt, synthetic construct
  misc_feature 1..21: note = Synthetic
  source 1..21: mol_type = other RNA
aggactgaatttgtgttatat

SEQ ID NO: 620 - RNA, 21 nt, synthetic construct
  misc_feature 1..21: note = Synthetic
  source 1..21: mol_type = other RNA
tgcctacttgctccttgtgca

SEQ ID NO: 621 - RNA, 21 nt, synthetic construct
  misc_feature 1..21: note = Synthetic
  source 1..21: mol_type = other RNA
gtgcaaggaacacgaagacga

SEQ ID NO: 622 - RNA, 21 nt, synthetic construct
  misc_feature 1..21: note = Synthetic
  source 1..21: mol_type = other RNA
ctttgagaacatggactactt

SEQ ID NO: 623 - RNA, 21 nt, synthetic construct
  misc_feature 1..21: note = Synthetic
  source 1..21: mol_type = other RNA
ataggactgaatttgtgttat

SEQ ID NO: 624 - RNA, 21 nt, synthetic construct
  misc_feature 1..21: note = Synthetic
  source 1..21: mol_type = other RNA
tacttgctccttgtgcaaggt

SEQ ID NO: 625 - RNA, 21 nt, synthetic construct
  misc_feature 1..21: note = Synthetic
  source 1..21: mol_type = other RNA
gccggaagtgtgccaacgaca

SEQ ID NO: 626 - RNA, 21 nt, synthetic construct
  misc_feature 1..21: note = Synthetic
  source 1..21: mol_type = other RNA
aatcaacatctactgtctcac

SEQ ID NO: 627 - RNA, 21 nt, synthetic construct
  misc_feature 1..21: note = Synthetic
  source 1..21: mol_type = other RNA
catcaagagcattgtagaagc

SEQ ID NO: 628 - RNA, 21 nt, synthetic construct
  misc_feature 1..21: note = Synthetic
  source 1..21: mol_type = other RNA
atacttgtatatgtatgccaa

SEQ ID NO: 629 - RNA, 23 nt, synthetic construct
  misc_feature 1..23: note = Synthetic
  source 1..23: mol_type = other RNA
caccaaattggcatacatataca

SEQ ID NO: 630 - RNA, 23 nt, synthetic construct
  misc_feature 1..23: note = Synthetic
  source 1..23: mol_type = other RNA
acgtgagacagtagatgttgatt

SEQ ID NO: 631 - RNA, 23 nt, synthetic construct
  misc_feature 1..23: note = Synthetic
  source 1..23: mol_type = other RNA
ccaaattggcatacatatacaag

SEQ ID NO: 632 - RNA, 23 nt, synthetic construct
  misc_feature 1..23: note = Synthetic
  source 1..23: mol_type = other RNA
acaacatataacacaaactcagt

SEQ ID NO: 633 - RNA, 23 nt, synthetic construct
  misc_feature 1..23: note = Synthetic
  source 1..23: mol_type = other RNA
attatacaaaagttcctttacaa

SEQ ID NO: 634 - RNA, 23 nt, synthetic construct
  misc_feature 1..23: note = Synthetic
  source 1..23: mol_type = other RNA
agagcattgtgcatttattaaaa

SEQ ID NO: 635 - RNA, 23 nt, synthetic construct
  misc_feature 1..23: note = Synthetic
  source 1..23: mol_type = other RNA
tcgacttataatccattctgtgg

SEQ ID NO: 636 - RNA, 23 nt, synthetic construct
  misc_feature 1..23: note = Synthetic
  source 1..23: mol_type = other RNA
ttcccatcctggatcaggctcga

SEQ ID NO: 637 - RNA, 23 nt, synthetic construct
  misc_feature 1..23: note = Synthetic
  source 1..23: mol_type = other RNA
tcctctactaactttgctctaag

SEQ ID NO: 638 - RNA, 23 nt, synthetic construct
  misc_feature 1..23: note = Synthetic
  source 1..23: mol_type = other RNA
tggatcccaaacaccttgcacat

SEQ ID NO: 639 - RNA, 23 nt, synthetic construct
  misc_feature 1..23: note = Synthetic
  source 1..23: mol_type = other RNA
agctcttcctttacctggtgact

SEQ ID NO: 640 - RNA, 23 nt, synthetic construct
  misc_feature 1..23: note = Synthetic
  source 1..23: mol_type = other RNA
ttctggttcagtgtctgctggac

SEQ ID NO: 641 - RNA, 23 nt, synthetic construct
  misc_feature 1..23: note = Synthetic
  source 1..23: mol_type = other RNA
aacaccttgcacatggagcaggt

SEQ ID NO: 642 - RNA, 23 nt, synthetic construct
  misc_feature 1..23: note = Synthetic
  source 1..23: mol_type = other RNA
acaacatataacacaaattcagt

SEQ ID NO: 643 - RNA, 23 nt, synthetic construct
  misc_feature 1..23: note = Synthetic
  source 1..23: mol_type = other RNA
atataacacaaattcagtcctat

SEQ ID NO: 644 - RNA, 23 nt, synthetic construct
  misc_feature 1..23: note = Synthetic
  source 1..23: mol_type = other RNA
tgcacaaggagcaagtaggcacc

SEQ ID NO: 645 - RNA, 23 nt, synthetic construct
  misc_feature 1..23: note = Synthetic
  source 1..23: mol_type = other RNA
tcgtcttcgtgttccttgcacat

SEQ ID NO: 646 - RNA, 23 nt, synthetic construct
  misc_feature 1..23: note = Synthetic
  source 1..23: mol_type = other RNA
aagtagtccatgttctcaaagcc

SEQ ID NO: 647 - RNA, 23 nt, synthetic construct
  misc_feature 1..23: note = Synthetic
  source 1..23: mol_type = other RNA
ataacacaaattcagtcctatcc

SEQ ID NO: 648 - RNA, 23 nt, synthetic construct
  misc_feature 1..23: note = Synthetic
  source 1..23: mol_type = other RNA
accttgcacaaggagcaagtagg

SEQ ID NO: 649 - RNA, 23 nt, synthetic construct
  misc_feature 1..23: note = Synthetic
  source 1..23: mol_type = other RNA
tgtcgttggcacacttccggcag

SEQ ID NO: 650 - RNA, 23 nt, synthetic construct
  misc_feature 1..23: note = Synthetic
  source 1..23: mol_type = other RNA
gtgagacagtagatgttgatttt

SEQ ID NO: 651 - RNA, 23 nt, synthetic construct
  misc_feature 1..23: note = Synthetic
  source 1..23: mol_type = other RNA
gcttctacaatgctcttgatgag

SEQ ID NO: 652 - RNA, 23 nt, synthetic construct
  misc_feature 1..23: note = Synthetic
  source 1..23: mol_type = other RNA
ttggcatacatatacaagtatat

SEQ ID NO: 653 - DNA, 32306 bp, synthetic construct
  misc_feature 1..32306: note = Synthetic
  source 1..32306: mol_type = other DNA
agcactcccggagcctgcagcgcctgagaccaccctccccgccccccgagcccgccgcccggcagggtgccccgcgccgttcccgccgcccccacgcctgttcccggccgtcgtccccgtcgcgggcccctgcaccccgagcatccgccccgggtggcgcgtccccgaggccaccaggccggcctcttctccccatccgtcccgtccgctcgcggtgccatgccattcctcgggcaggactggcggtcccctgggcagagctgggtgaagacggccgacggctggaagcgcttcctggatgagaagagcggcagcttcgtgagcgacctcagcaggtgaggggacccgccaccaacttccagcccccgcgaaactgacccgggctggtctagggggcgcagggaccgcgaatgaggggtaggcagggctggagcgggctgaggagggagaccctggcccggagggtgggactgcagtgcctgatttctgtagaggtctccggaccatcggagacgggaaattcggtttctcttcttgttcaaggtcagtgtctccaagtggacacgactccttacagaacacctggtccctctgagagtctgatgacattcgcggatcgtgtccccaaacgctcgctgaaacttaatgacacagctttagtggtccatgctttaaggacacagaagtcgcgcactttgcccttgtgggggcgcgggctggtgggctgagccccttcaccgcggggtggcccggctcccagcgcccaagcactgtggacgcgacgggtgacgggatccgacgcaggtcccgcctggagcgcttccaggccctgcccaggcacgggcaaccacaagtggccgggaggatgagtaactaggaagggacagacagatggtccctggagcagccgcttactgggcggacttgggagcggtggaggctcggggctgcagaggtgcagaggagggaagtgggcaggggatgaaacccaagacagctctgcttctgggaggacagggctcttgcacctgtttcctcggtggccctctcggtcgatcggctttatatagagagtgcgctccgtttccaggggtgcctgtcagctgcgaaaagcctgcctggccccggtgaacctctggatttgaggtcttacctgagccctgtggtctgatgggaaacctgaggtgcgctccccgctcagcttggcgaacgacgctagcgcccggctagtaagtcaggtagcctggaatttctcagcccctgatctcaacagttgactttcagagactcttagcatttagcctcgtgaggcgggggggcgatgaaagtggttccagaagggactggtgcagccagagtcacccttgggagccttttcctgccgcctttggttaaaaccatgggcccctgcacccttaaattggcttcaatggagaattctgtttctgggccaggttcccgcttactgagatttaccagtggttgcttggaaaaagcattggcaataaattttgagaagactatcaagaaaatgtggttattttgtcagcttgacctcccgtgcctcccatttgtttgcgatttgtaatgcatcaaattcccattgtctcacaatgtaaagaaagacattatttaatcctggtggtctgtccggagagacttaagcatattaactgccagcatataaccatttatgttggagttacttggaggcagtcccaggggaatttagggaccaccataaggaaatcttatttacataaaatcaggtaatttatttacagtaaagtaagaccaactgctgttgacagactgtgtcttttatctactggagttaccaattatgcctaaattattctccctcaacaaaatgggaaacttccttcctccttgttcctaaggacaatgatctaacattttggtactttatttctgtctacaagttcaggttctttctagaaaagtgcagaaagggtctgaagagtcatattagagccactcacccaaatataatttcaggatgcttctcagtggatagcagatgattgcgttcagcaggagaagatttaaaatgtagggttgtattaatactcaccctacttgggaggctgaggtaggaggatcgcccagatgttcaaggtggcagcaagtcatgactgtgccactgcgctccagtctgggccacagaccaagaccctgtctctaaaaataaataaacaattaaaatttgctttaaaataccctgcaccagcatcaggagagaaactggtgtcactctcctttagaaataaatagtgttatctctgtcttcacagtatggaagacctgaagatggtcttaacttaccacaaaagtttagactgggctgggatcaggtggcttcctgcacagcccccctcccatgtctctgtccccttcataagcctcttttctttcttcccatttcacacctgagctggagctgtcacatccatcatcattaccgcaaatagtcattgatatactgaccacctgtggtctcctttgagtcagcgtttaggaatcattgggtagcctcctagcaaagcagctggctgtttgtttgcagggtattttttttttccagcaactgtaaacaatcccttccctacttagcatgagaagcctgccaacttcttaaaagcagttggccttctgtggtctgggtgtgtcatcttaaatatcctcagtttttggtgttggtgacgtttccccgtgatgtcaggtttgggctgcgtgtctgcctacacaggtgaagctgaatgcttctcctgttttgagaaaacaaaaggcaggcccttaagcgggcaaggatcatgaaacagaactacagagacatggtagactaattctctaattccacagaccattcagcaagcggcccgaacaagagcccaggataaaggatgcatgtgttggttttcagcctggggttattattttgtgttgaccaaggcttgtccacacagcacacctattctggactcagctggccatcttctctgtggtccgggactccaaccttctccggtgtaaaatgttacaaatccagtctcagccttgtgtccaggagtgagatcatgggaggatttaagataagcttaaagcaggaccccttctcaaaaatgttgaaattatataaaatagaaggggaatggcaagtgttaaatatggtggggcagatttaaaatgcaaggaaagagcttggcgtgaattgggatgatccaagaatgcttcaaggaagtggtggttcaggagcctgcacagccctcctcagcaaccaccccctcaccgcccacccccaggatgagtaacctaagctgtctgatcctctgccactcttttctaagcctacacttctgtctttgaaaactgactcaaatgttgctttactgtatagctaaggctggacccggaagcaggaagtttaccttggtgcctggataaaaataatagttcagattttatgagtgcttactgtgtgcaagacactgttctatgagcgttatacactaggctgttggtttcaccagagcattctgggtactagccttgtgagtttggcgatctagagatgtgtcagtaaattggcgtagaaatctcactggctttcatcaaggctatataactacaattaagcctctgggggcacgtcacagctttcttaaatggtttttattgcaaatgaaatgagaaatagggctttattttttttttcattcccttctttatctgctgccaaaacagtcttatttatggtcttattttgaattttttctacatttttaaaaagttgccttaaagtgtcttggtatgtggtaatgtggggctggggagtgcgtctttttcttattctaggcctgtgcctataaaaatcaagattagtaaatagtgactacaaaatagcaacttgctggctattattgaatttagtgaagaaagcagcctcgttgagatggttttgcttattaaaaaaaaaaaaaatccagtgctccaattcctaaatggtggtggtttttcttgttaaaaatttcggttgtaattttccattggctttgcattttcttgaaaaggacacaattgaactctcaaaatagcctctaactgaatatattattgcttaaaagaaaacatataagtaggcaacacaaataaaccccataggccttctttccaggccctacctccggaatctaaaacctaataccaagtgaaaatatagggtttctctttggttaaaacttttctacattcgacagtgagagaacatcatcaattatgtaaaattctttctaaactagcttttgaaatgagtcactcaggcttaaagcaggttattgtagtttctgaggaaagtgagtgctccagttcctttaaagaatgttttcaactggaaaagaaaaagatgaaatataaatatttgaccttgctaagtaatgatcacagtgtatggcccaggctcggaaaatctgctgctgaaccttaaatgttgagaataagacaacctcattttatgattctctctatgtggaatttatactgtaggtttttgttgtttgtggggggtgtgtgtgttctttctaaggaagccttcatgtggtatttttgcacacaaaatgttctagctttgctttctaaagctgatctcagctgtggtacatcacggaccactcaaatgaccttccatcttttgctgtttttctcaacgttgattgaaatgtcttaagttagcctcaggaattcagctctgttctttgttctgtccctcttttccttctgaccttggagcagaaaatcaactggtcagtgattctatacccctatagtcatgcaaatagacagaaacacactcctgtgttatacaaagcttggcccaaaacactcatccttggcttgttttcaaaagtgcctctgagaggacatttctgcaggactctatctgaaacctaaaaatatcctgtttccctggatgaaaagaaggctatcgagtttagtaggaaacagtaaatggtattaagcatggccttatgaaggaagattaacaaatgattatttatcatgttagcccttaagggtccagaaaagcaacactgagtatattgttggagatgtcatatgtgagcatattagcaagatacttgtactaactgaagtgctacttaagacagtattgtattaataacaaaaagatactggaagttgcttcaaatctttttttctcttctaccatttatacaatgccaaggaaatagagaagtgcagatgtacataattatacccaacagatgtatatccaaaaaagatataaatcaaattgcattttaaattcagcagaaaaactcagaacattaaaggagtataaaatatcggtggtatagcaaaaaaaaaaaaaaatctaatttatgttttaccagttggcattataaatcctgttttatatacttcgtgggggttgagggagttagggaacctatcttatcatacttcaacatttctcctgcattccttctgtggaaattattcagatttactttgaagtaacattgtatagttgaatagcttactacccctcaaatgattgctcagcccaccgagggaaataatcgccaggcccgaggtgagcctgcccatccttcagtgacctgtgaattaggcaggtacatccaatgtctgttcagcccttataaacttatcaattataagtttaccttgtacagtcaagacccaaagtcttcgcctcacagcatgatgcctagtgtgtgttagtcaaggcactacatgaaacctaagcaactagcactatacacaaagcatctcctagaaatggagtttatatgtcagatttttgtaaatgtgattgtgttttaaagacatgttggaaggatactacttaaaagcagcttaagtatactttaaatggatgaattgtatggtatgtgaagtttatctcaacgaagctgtgtttttttgttgttgttttctttttcttaagcagcagtagcagcttggggtagatgctttcgcaaaatgaaggcattgtgtagtacagcgataccagtaatcacccctcccctccattcatcgtttttgtttcaagtaatattgtagtactctgcattgctcttagttgaagagtagagtgctgtgtgtcaaattacaatgcaaggcactgttaaggaattcaaaagaagtagaagctcccatccctgccttccacacagatgtgaacttgcttcatcctaaaggagaagtctgtgcctatatagactttttattttttttgagtgatcattttattgttttattttgtttgagaagcctgtatgtttgtttgtcttataactcagtgagttatttatagaaacagctcaggttcatgtatagctgttacatctcatcctctttgtcttctgttattcatagttactgcaacaaggaggtatacaataaggagaatcttttcaacagcctgaactatgatgttgcagccaagaagagaaagaaggacatgctgaatagcaaaaccaaaactcagtgtaagccatttgttttgaacttcagaaaaaatctgtttgaagatagttatgattggttcttggaggaaaaaaaaaaaaaaaacacctcccatgtcacacgtctgcctcagtgttttactgtgtgtccctgacagaggttactgagatcttagcactcagaaacctggctgtgcattttacaagcgagattaacatattctttatagtcttgtttataagtcagttgctagttgagggccttttttcctgccagtcatttgtatttggttattttacagtgatgtggtcagctgaatcagttccagtatgtatttttattttgaactgttttgaggctttgaaaacagatttttctccctctttccttctataaatcctattaacatttctagatactatatgtaagtatcagcagagaatataaagttgtattaatagcaggaattacaggttactttatctgtaacgcatgttttcctcatgttatctgtttgatttctacttttcatgggcttatataagtttcaggtttggcattgaaaataaacttgtacttgagtattaggtttgtgtggtttttttatttttttattttttattttttggtgtttttttgtttgtttgtttttgttttttgagacagtctctctctgtcacccaggctggagtcagtggcatgatctcagctcactgcaacctccacctcccgggtttaagtgattctcatgcctcagcctccagagtagctgggattacaagcacctgccatcacaccttgctaatttttgtgtttttagtagagacggggtcttgccatattgccatgttgcccaggctggtctcaaactccagggctcaagccatccacgcccctctgtgcacagcatgtgactcagtctgtcaaagcctaatttcattttttggtggggacggagtctcactccgtcacccaggctagagtgcagtggcacaatcttggctcactgcaacctccatctcccggtttcaagtgattttcctgcctcaacctcccaagtaactgggattacaggcgcctgccaccacacccagctaatttttatatttttagaagagatgggatttcaccgtgttggccaggctgggctcgaactcctgacctctagtgatctgcctgcctcaacctcccacagtgctgggatttcaggcgtgagccattgcatccggactgtaatttcttatggcataatgttttagaaaataataataataatttggagctttggtataggaaatctggctatcaaagatttagagtgcttcagacaaagcaacttatagccccagtatttctacactgcagaaattaagcatttgaaactccttaggttgtcagtagagtccttatcttttttgtcaaaacttttaaaactttggaatacatgaaatgaaatgttttaaatcttgagcatgttgcagatattaaagctgtgtattctttttgtctctatagatttccaccaagaaaaatggatctatgttcacaaaggaagtactaaagaggtgagcatccattcatttactaagttatgctaaaccttatcccttcctgatagcgtagggagggagggatatggtagggagggaaattacttcaaatcatgagtgtcttcttggatgtgggagacagcagctattagtctattatctagccaaccatcagagtttggaacaacagagagagaaagaagcaaaagtcaccaggtggaccctctagtcgttcaatgaaattatgtatgtaaaagtgctttataaagactgacatgcccatctcaaccatattattatatcgtcctgggttttgcctgagggcaatgtctcccttttgttctaagatctctttggacttcaactcagttaaatttcagtcctggaaggaataatcactaaatatagtagaagttttcagtgcctgctcagtgtgatatgggaggggacaatacattataataactacatttgtatggcactttataaagcccttttatgtatattttctctctgcacaggcatttgctaaaataactaggatacaagcatatgaaagaatttctctgactgtcagggacctcagtgaacatctagttccctctgtgatttgaggtccagagggggtcactgatagtcccaagaccacccagatacccagataccaggactacgagccaggactttatactcccaattccctctgtgttcataggttaaaagatcaaaacttctttgctttctcccaaaaccttaaaaacacttttgatgatcacagtgagaaaagcactattggtataaggcaagctggtgacacagttggcgcaggtaggtctaattctcctcctaggagtacgttacagtcaccaaccatcatgacctcccgtatcccataccttgctcccagtcttcccttaatacacaattacttatgatttttctagactaatatgtggaaaaatcataagcaaggtcccaaatggtacaagtcaagaaaagggcgtgtttaacatgtgaggggctgactgaggcagctgctggctgtgttacccaccttggtgcctctcaagggcttgtgggtacaggaaagaagccagtgccccaggtcacctaagacaggcatcaagctcatttgggaaaatccagttgggttgttgtaactggctcattctgacatggatgacctctgcatgcaggagtaacttctgtgtctttgttttcgcgttcagcgccatggatattgcactctgggggaagctttcaacagactggacttctcaactgccattttggattccagaagatttaactacgtggtccgggtaagtctcaaatgcctaaaggctcatccaggccctttcccaagttgaatcatctctttgggttgtcttgaagtggtttccccaaaaagtaactttttaggaccttaagaattttgaggcaagcagaaaacagacccctcaatctccttcttccccaacatacttcaagttcttaagtgggtcgcactaggatgtccctgagattggccaggacgggcaggggccgccatattacccccgtaagtgggttaaagagccagcctcttcaagtgaaatttcacgccaagccccttccaagcccgccctgtggatacatgggaacatgtcacaggcagcaccagccctggcaacagccttagcaagagagaattcagcaggaagcaaaccctagagcactttggcctgtttcaaaacccagcacctctgactgttctcactgtctcccacttgtcctacttcagctgactctgggggaccccaaggcattctcagaagaggccacaaaactggatgagttaaagcacctccgtgttttgtgcctgtggttcccttccacccccgtgtgataacagtattcaatcccatgtccaccgaaagcttaaaactgcctgttttggccaagtgcagtggctcacacctgtaatcccagcactttgggaggccgaagtgggtggatcacctgaggtcaggagtttgagaccagcctggacaacgtggtgaaacctcctctctactaaattcaagaaaattagccaggcgtggtggcacacacctgtaatcccagctactcgggaggctgaggcaggagaattgcttgaacccgggaggtagacattgcagtgagctgagatcacgccattgtattctagcccgggcaacaggagtgagactccatcttaaaaaaagaaaaaaatacaattctgactgtttggatctgccattttccattttaaacccattttgaaaaaaaaaagactgattgcggtgactcatgcctgtaatcccagcactttgagagactgaggcaggcgaatcacgaggtcaggagttcaagaccagcctggccaacatagtgaaaccctgtctctactaaaaatacaaaaaaaaattatccgggtgtggtggcaggtgcctgtaatcccagctactcaggaggctgaggctggagaatcacttgaacctgggagacagaggttgcagtgagctgagatggcgccactgcactccatcctgggcgacagtgcgagactccatctcaaaaaagaaaaagttaatgagcaaaatattaatgatgaatatggtaaagcagatcagcttaaccatgactgtcatgttattatttttaattggtttattattttgttatctctgcctaccctccaaagctcccttgtgtatttttgtcagcagtcaacctgggaggtagcagctgtttgggttttaggctcagaagtaggagggaattttcccccgtgggtgtggttggtttggtttttattttctttttcctggattgttgtgcttctcggtgctgtgccactgagtcagatgattgcagaggctcagccagggtgatgacattcaaggccccttgagacctggatccttcacctgtcatctgggcagatgcaggcttggctgtccaaagtgacctgataaaaacccaggcctgcaacaagcaggttaggagctgtgagctgagcctgtgaccaacagagcagatatattcgctcttcagctaagctcttcttccaatccaaaagggataaaaataagagaccttcttgggtgaaatgttcacgccattcagtgtgactctgcaagttcacggaggtcacctagtcctcctagggcccacagactagtctaggctggttggaaatgggcccaggatgatctggaagcttctactgctaagaatacgaatagtttccatcttctgggtattagaggaagacgcttagatctgatgtcttattacaaactgatcttcaaaatggtcagtttttagatggccttcctttctacctgcttttccttttacaagaaataaagcaaaggaacaagcatcatgatagtgaaaatctatttcatccaatatgttcattttcaccttttatctttttagtaaccctataaaatatgggtgctttgattatctctctttaaacaaatgctagtacagtaagataaaatgacttgtccacgatcacaaagggatgaaatcaagatctgaaatctgggcagtcttagagtctacacttttaactgctaccatgagttctctgtgagcagaggatctgaagtaaaacagcctgagggcaggtcctagctccactgatttcaaactgtctcagcctccctagagacgtggtttcctcctctgtaacaatgacttacctcaactttccaaggtaactggggaaacttagtgatataaacagaagcactttgcacagtagaatctataagcactttgcacagtagaatctatctatctactactagatagattctagtagtagaatctatctactgtgcaaagtcagccgctaatgtttactattacccacttaccaaaattattgatttccccctaagatgccttttcagttgagttgattaaaatgttttctacttttaaaaaaataattggtgaatctggcacttgcgtaagacgcagcacagagaacacgtatccaagagtatctaattgtaaaatacatcatgagcattttgctttaaataatcttagagaaactgctgaatgctttcaaagttgttaggctcagaaatagtggaaaaatatgtctattttgcaaagaacaatttttccccatcactattagagacctctgtaatttgaggaataatatgttatttttataaagaacttaaaactttttaatgatagccaccgtgttttgaggttttccttcttaggaactcagtatacttctcatacactcttatccttaaaccaactctgcaaagtagcttgccagtatattatccccatcatactactttgacctaatggtgtttaaatgctacaatgattactggtttcactaaggagctaaactgattttaagggccatttggaggaaaaaaaaaaaagttcaaagccttgagagccaaatacattttctgaaaatctgttatgttcatgctggttgtcatcttcccaaaaagagccatgcagaggtaataaaagagacggctaacactgctatctcaaagtgttatcactcagcatgaaaatttcatggaatgtttagagttggaaaattttttactataacttggaaagatgtttatataacatttctacatcaatttcactggctacaagctacatgtattggccctgctccctcccctacacagccccagtgacataaagacagttctagctatgtgttttaaagatttcacatctctagaagcagcagcttacctactcgtagaaggacatttaaaacatagtttaccctatagctcaagaccaacacattttggaaattccctcggggagctggagaggattccagaggctgagccagtcggactggaagtttgtaaacatgagtaggtgagtgctgactaaccaggtcacagagaggtcagaggattgagtgagtcttgagcatcaagtcaaccaggagaaggtttcagagaccatcacccatgtaatggctctgcagtgagcctgctgtgatcccagtggttcttagccctggctgcacattgaaatcaccttcgaagcttgttaaactacagaagcccacctctggagtttccaatttaattagttgaaggtggtacccaggcattgctacttttaaaacgtctgcctggtgatctcaatgagttttcaagtttacagaccagctcggaaactactttggagcccagatattacattttgcatattaatgagaatttttaaacaaagtgcatggagacattaaactctagatatgacttctggtccttcaggaatttagtgatggaaagaggacagcccctcctatattccagctcaaagttcgaagtttgttttttgtggtaccttctgcgcatcaatcactttacttctctgaactataaaactgggataaccataccatacctatactgaagcatttttatgagaatgaacaaataaaatgtaaaaataaaggcagtgggtgtgaacgtgttatatacatttcaaaatgcaatgtaacttacttttcagaaagttaagtaggattttagcatatgcaaccacctttctagggtgactaaacctgaagactcaattcataggccagatacagttggggacagagatttgcctatttgcagtgggacttctgaggcccttagaatggttgtacatttttaaaatctttatattctcgccagagaggctcaatgacagaaaacaccaacatttatccaaacaactgcccctgttcccttggtccctagtgagtcccttgagaaactgcattattgggataagatggaattaagataaaaactgagcagtaccaataaaaagtatggctttaaaaggtcatgaaagcaactgttatttggtgtctgttattgctgagtacaatgtaatacagagcttaaacttgaattcaaacttgtactcctctaaaacctgtattattttctccaggccctgccactatagccagtgagggaaatagatgaaataaatctgactctaccttgaaggtctgcagcaggggtcagccaactcctagccctcaggtcaatagcctaccatctgtttttatatggcccatgagctaagaatgatttgtacgtttttcaatgttttaaaaaattaaaagtataatatttcataacacatggaaattatgtgcagctcaaatttcagtatccataaataaagttttattggaacagctatgctcattcattagatactgtctgtggctgtttttgtgcaaaatggcagagttgggttcagagttgagcaacagagagcttatagcctgcaagcctaaaatatttactgtctggatttctacagaaagaaaaaaaagtattgccccctgccatacagtgtaactgatagcctgagaagtgtgcattagaagaagttacctactctgacaccatgagaatgaatttgaaaagaaccaagatgtgctagaggcagataggctatgaagtttcggaagggtagcattactgtgggcaggatattcaagaaagacttcaaggagaaagtgggatttaaactggtcttgagtaagggtagaactcaggggaactggtttgaggcaggcaggcaggtataaggtctgttgagagatcagtgagcagaatattcaagtatggacagaagtagcacagtgtgctttagaatatagatcatgggctgggtgcagtggctcatacctgtaatcccagcactttgggaggctgaggcaggaggatcacttgaggtcaggagttcaagaccagcctggccaacatggtgaaaccctgtctctactaaaaatacaaaaattagccaggtgtggtggcgcacacctgttaatcccagctacttgggaggctgaggcaggagaatcacttgaacctgggaggcagaggttacagtgagccaagatcgtgccactgccctctagcctgggtgacagaggccgttgttttagaaactctgtctcaaaaaaaataataatataagatcatcgaagggtgttgccacgagctggttattatgatcttgggcaggcctctgttgcccatctgtaagatggaaatgatgacaatagcaccctgctcctagatatgatgaggactaaatgagataagcagtttatgagtgttagtcatgtatagtaagaagtttataaacactactgatgattgttcatttaaatatggctagaaaaggagattggacagacttgagaagaggcttcgagtgtgaggctacattatctagtacgcaggaggaagccactggaaaaaaacaagaaacagcaccttggccaagcagtgtttcagaaggtcatgacttctaacaggctctggcatccccagatgccatcaaccagcaaattataaatctgttactttgtggttgacaaattccatctttgtgtatctacgtctttgataagcacagtcaggctgtacagtaggcagatgttgttaacccattttagaggtgaggaagcagaggccagggaactgggtgatttgcacaaggttgcctgcccaggaagggacgtggaatagaggcaggacctaagcctggttctccaactcctgctccagtgctctctcctttcaaccgcattgcttagaaggcaaaatgcaaaatggagcctgccttttatcaccactaaaatatttgcacacatgcacacacgctatcacagcagagggtcttaatgccagaatgacctttgatctgattactcctagctctctctatgggatgagaatgagcccaactctatagtaactgtagctgccattaacagcccaggaaggtcagggagaacttgagtaccagttttctcactggagtaaactgacccatacatgctagtggatgaagaaggacaaataaaagcttgcaaccccagtttctttgtccctctgcagcagagcatcacaacctaaaccgatgcacattcctatttttttctgcgttaccaccctaagtgcatttgaatgtttccagcaagttactgcattcctaccacccctgaaagcattttccaaaaacatgtttcagtttaagttgactggcggtttggcaaacaaaaggctggaatatggcacaatgactcaaatttaaacccaatgccttaaattaaaggcatgctgttgccaagcccctggtgggccttgatgtgcatcagcatcctggccccttcacacaggttcctctgccacagtgaccttggattcactggaggctgtacatgcagaggccttcctctgatggagggtggcctcagccacctgggctttaaactggtgctatctgggatgaaggaaaggccaaccactgcagcagcaataaaggcaaaagagcagaatcatgggcctgtttgaaaatgatgcacagagccaggcgtggtggctcacacctgtaatcccagcactctgggaggccacggcaggcagatcacctgaggtcaggagttcgagaccagcctggccaacatggtgaaactccatctctactaaaaatacaaaaattagctgggctgatgacacactgctgtaatcccagctactctgaaggctgaggcatgagaatcacttgaacccgggagccaagatcttgccaccgcactccagcctgggtaacagagggagactctgtctcaaaacaagaaaaaagaaaagaaatgatgcacagaaatgattgtgatcccacccttctgaaacttccaagcctatctgcctccaccatatcttggtactgggagcattcacttagtcccagctactcagaaggctgaggcaggagaatcatttgaacccaaaaggcggaggttgagggcacagggtgggtccctcagtgactgctggttaaactgctagtgatttcatgggaggaaatctgtatctcctggaatttctggccttgttattcatttttattagcattcaggcaggcagatcctgaggtgtctaggtgcccacagaagtggaggctgctcacagacacggggacatggccacagcattagagggggctgtgcggaaaaaggaggccacctgaagaagtgggagatgcccgcaccaccctaggtgtagtagggtatttgcagaagtaggagggtacccacagaaatgagggctcccgtggaaatgggggaagattaagagactagagcatagactcctaatagtataaaataatttaagcatgcactctcaatttatgcatattcataaattcacttagaactcatacacctctaaaagatgccagtaatgacatctaccctgcagtgttgctgtgagaatgaaactgaatgtcaacctggtaaatgctgtagaaccacacctgggatgtggtaacattcaaggagtgtagtagttgttgctgttactgtcatcatcaacttgagggaccttattgtgggcattagaaaatacacaaaatcagagattaaagatcatataaaatactgagatttctgttttgttagttttctacctgattttctttccagtactacttcagagactgctggattgaaagtgtgcccattttgtataattttttttcttgatgactcaggatctaaacctatagcactagcatcccagcagtgttttttctttttttttgtttttgttttttgtttttgtttgttttttctttgtttttgttttgttttgagacagagtctcgctctgtcaccaggctggagtgcagtggcacgatctcagctcactgccacctctgcctcctgggtttaagtgattctcccgcctcagcctcctgagtagctgggattacagatgccagccaccacacccggctaatttttgtatttttagtagagacagggtttcaccatgttggccaggatggtctctatctcttgaccttgcgatccacctgtctcagcctccaaaagtgctgggattacaggcgtgagccaccgtgcccggccaatgttttctattaaaattctagctaagcatcttggccctgtcgggggcttatcacaccttgggatgtgccaaattgttcaggtgagctgggttttcagtgccagtcccacagaccttttctcatccaaggagggatgctcctgagagcatttacactgtgctctaagtatctgggacccagaatctaaaggcctcatgagtccagtaaaggaagaggtctccgacggcaagaagtgggaattgacagcatcctcctgctaggtctccatatgcagcaaattgcttcaaatgaatgcttttgaatccctgaacaggtatttctacattgggcccaaacacctagtgttgccatagccacttgagaatcatgtcagacctggcccctgcttgtcaggtgcttctgggctactctgggggggacaaagtataactattcaaatggcaaattgaattagcacagtctgggagccttggagatggcttcttgaaagaggtagaacctgaaattctccttccttgggggacggccagtatttggccagatggaaagacaagtggaaggctttgcagagacaagcgatgtaagcagaacctagaaatgggaaggagcgaacgtgaaggggaatgattttgggtcggggtcaatagcaatatgacattcagcctgtaaaactgtagggcagaggtgagcgttgctggaatagatgggagctcagtttaaggaagatcactgccaaacgtcactgttcagatggatgcaatggggaatcaacggccattatcaattcaaaagtaaccagggccaggtgtggtggctcacacctgtaatcccgacactttgggagactgaggcgggtgatcacttgaggtgaggagtttgagaccagcctagccaacatggtgaaacgccatctctgttaaaaatacaaaaatcagccggacatggtggcaggtacctgtagtcccagctactcagaaggctgaggcaggagaattatttgaacctgaaagggggaggttgcagtgagccagttcacaccactgcactctagcctgggcagcacagtgagactctgtctcaaaaaaaaaaaaaaagaaagaaaagtaaccaggatgggtgaaagatgaagaggcaagtctctctctgctgagaatacaattaatgcatataaacttggctctccttattattttaactccctctgttaaaagagagctgtttcacttgcaaataatatttatccaatcttgacatgcctgcagattattaatgtcgctgaaatttttttctctttcaacctgtcagtgttcaagctcaaagtcagaagaaaactttccaggttttttatctgtgttattcgctgagtaaataagggtcttggaagtacccagcactcagagcagggagaggcactgcctagtctaactgaaggtttattatagaagacgccaccttcctatagatggacacccaacttgggtattgagcatgtgaggcatggcaaggctgcttgaggctgggcctcgtttctgcctttgataactctggcagattttccaatcagacatatacttcatactgtagcaccccacttgtatacaagataaggaatttggggataaattgtgttcttattcttaacaattctgtatgagaatgatagagtatacttaggcaagagccttgtggttttgtccttttaaactaacaggtagaagaagctgctatttttgttgatgcttctgaaagcccaagtgtttactgtcccttcagatctcaggctgcttgcccttctggaaagtgtttgagatgtgtttgcattgtaagtaatttactcctaggcccatgccactcctggggcatcagtctggaaccagtccccatacagatatcagcctgaccagccagatggtctgccatggaccttgatatgtcatttggccatcatgagccgcctcacctgtagcaggaggaaatttgggtaaactgtttcctgagtcccttccagctacaacactctttgattcaaaaagacaaatgtatgtttaaaaaaaacactatttgttgagtgccaggctgggggtagagtgggaaacaggacaacacttgctgtcttgagggttccatcctaattagcccatcagcaaataagtgagcaagaccagttcagatatgcataaatggaacaatgaagaacaatgaaaccatagtaagatgaagatggcaccagggaggctttcacatgagatggccaggaaagggtcctctgagcccggggcaggccacatttgaactgagacctgagggatgggatggagctgagcatgtaaagatgtggcagaggcaaaggcccagaggtgagaataagcttgacctactcaagagacaaataacctgtgtagccagagcagaatgaaattgtacaaaactaggctggaaaaggagtagaaaccagatcagggagaaccttgccagtcatggtaaggagcttgagttttttcctaagtgcaaggagaagccatttgaggattttaagcaaagaagtaatgtgaactgatggattttttaaactatgaatgctatactaaaataaattgtagggaagaagatgtaagaagcctgctcttgacacaagtgtagtgagataagagggaaatctctcttctgcccattcatcttgcacacaccacttcaaactctggttcatatccgctctgagatttgctagacgatattgcttgcaactagatttgtctcctgttcgttgcctccagaactagcatgagccaaagctgaagggcaggatgtggtttcagcatgtggtgaccaccatccctccctccagtagctcagagctgttcctgctactgcacagctcgtcactgcagatcatgccggatgcccagagtgcccacacgataatgacaccatggaattccagaggagccgagaagcctcctcctccttccccttccctccccctgcctctctttaaacatagccacaaattactggcacctgggctaaaatttgcccagtcaaaaacaagcagccacttccaaacaagacattttcctctgttctctttttctcttgtggctaggggcaaagaatccaattggctaagtcatcttagtacacagattgctagatacaaacctactttcctaggcacacagctctcttaacacaaataaaagcgataaatttgggctgtgcgcgatggctcacgcatgtagtcccaacactttgggaggccaaagtaggtggatcacctgaggtcaggagttcaggaccagcctggccaacatggtgaaactcaatctctactaaaaatacaaaaagtatccaggtgtggtggcgagcacctgtaatcccagctactcagaaggctgaggcaggagaatcatttgaacccgggaggtggaggttgcagtgagctgagatcgcaccattacactccagcctgggcaacagagcgagactctgtctcaaaaataaaaaaataatttgaaagtcggtaaattctgctctcttcaccactagttccatacatcactacctagtggctctgggcctatagagtgatgctgatgtgggaagtagaacctgtggtttacctaaagcagttgcttcatcctaaatgtactgttagcactttctgggcattatagcgcccttaatattaaaagttgattaccagtcacagcataatattatgtaaaatttctagactctgtttccccagaacacaacagtaaatggtattgctccatttttggagtaaaatttggccctccatgcaaattgattggccttgacaaactgaagtcctgaaactgtcagaatatatgttctgccaggcacagtggctcatgcctgcaatcccagcactttgcgaggctgaaacaggaggatcacttgatcccacaagttcaaggccatcctgggtaacataggaagactctgtctctacaaatagaaataaaaaacttagccaggcatagtggtgtgcccctgtggtcccagctacttgggaggctgaggtgggaagataacttgagcctcggaggtcaaggctacagtgagccatgactgtgccactgcactccagcctaggtgacagagtgagactgtctcaataaaaaaaaagaaaatgtgttctctattagacatatctgggctcaagtcctggctccaccatttgctactgctggtatggctttaggtgagtgcttctctgagcctcagtatcctcattggttaaatggagaacctacctcattgggttgttgttaaagataaacaagattacacatgtatagtgcttagcgcagttgctgacacatagtaagcaccccattgttattgttattgttattgttagcaaaataagactccatggtagaaaaaccatacaagtcataaaatgtatcagcattaacttttatcaacagatagggtgctattaaatgtatcaccaacatagtaaaatgatagaaaggaatattacagtgtgaaagcatttatgcatttgtttgacaacaggtacaattgaaatacaaatatgcatttgtttgacaacaggtacaattgaagcaattccaaaggtctttaaatgggttgtatttgccctgttaactcagtatttcctgactggcaataattttacttggtaatgctctgtattatggtaaaagctaacgataataatttatcgagtatattctttgtaccaggcacagttatgaatgctatgtgaacacatttaatcttcactgcaactcggaagtaggtactattactgtgcatattttgcaggtgggaaaactgaagcggacagtttgcctctggagccctcactcttaaactctatgatatataccagaaactctatgatacagcccaggtgccaaatctggcgctccacctgatttgtaaataaagctttattggaacacacccacgcccactcattgacacattgtctatagccatttctgtactatagcttcagggtggagtagttgctccagagaccatgtggcccacaaaccttaaaacacctactgtttagcactttatggaaaaagtttgccaacccctgatgtcaactttaaacttcacaaaaagactggagttcagaaaggaaagaaataataccttgtaataaaaatgcttatgtttggtatttactgtggatttgtacatatttatctcacttaattctcatagcaatcctgtgaagtaagtagtctttttatttccattttagaaatgaagaatcaggagttcagagggattaaatgatttacactgtaggctggagagcaaactccatgagtctagggatcatgtgtcttcatcgtcatgtccctgtcacctaccacgatgctggcacagggtggacactcagaaaatacttgctaaatgaatgacagttacaaaggtcatccagctagagaatccaggtcttctcctattccagggttctttctcctgactccacaactgtctgacagttaaaaaaaaggtccggggggggggggactttcccttgagataggatgaagcccagagtggttaacatgtcattatgctgtcaattgacaagtttttgctgctatgttcctccttctccttagtcagagaagataatcagaccaaaaggcagttcgtttctcctccaatgcacagtcatggtgttgagagtttacttgtccttgtgattggtgcatattttgacaagattaaaactgacaccctcatgagatggtagtcacatggaatctgggttttggatggatttcaggcagtgctctggctgccttcctcccaaccccttgccccacctcctacccagtgatgagtcacagtgcacagccgattgcccttcaagagctgacccaaggcttttgttttctttcatctgcttcatgctggtcatgtgaggatcagggtattattagaccatcatcttgggcttctaaatcttgctgttggtcagggagatacatgaaaggtttagtcagtccctttgtgccattttcactcctctcttgactgtcacatgctggttggtggcaaagctaaaccacagaattcagtgtgatcaccgcccatggccatggtctctactggtgttttgatttcccgcctcttttagcagacactcggtgagctcctaacttcagactagatcaccagtactgattgtaacaaaccacctcctcctccggtcagctggcctcatctctccctgcatgtggaaaagatacagaagcagggagaaaaaggagtttggatgggggtgggtttttttatatgtaaagtaaaattacattcaggaaattaaaagtctgtgtgtggtttaacaggctcctaaaggactccagagggacaaaaattttacacaaatgccatggaagcagaggtgctctgaattgcctaggctgttgatccaaaagtttccattctcctctgccacccaatctttaaaatttcattttgcttcttcccttgggcttgattccagcgcccaccagagtgtcatgctcagtgtttattgacctgaaatgaagtcgggctgaaacctagccaggagatgaaattctcttagagagtttcctaacagcgaagattctagcttcaatgtaaaggagggttctcggttctctatgtctagtctactgagtctcaggctacttattaccccaattacttttgcaccagcctgatagttttctctgggggcctggtgggttctcatgaagttaattactttcactttatatcctcctcttttgtttgttaaccctgtgaatgcatgaagtgtgttcttttattttgctgtgttgagaaggactctgctgagtcctcactggttgtggagtggctcataaggtgggtctcttgagcctcactttgctcatctgttaagtggattgaactagatggtctcttaagattccttccggtctaaagtttcatttttcaacaataggatctttgttttttatttttatttttttattttttaagatggagtcttgctctgttgcccaggtgggagtgcaatggcacaatctcggctcactgcaacctctgcctcctggcttcaagcaattctcctgcctcagcctcctgagtagctgggagtacaggcatgtgccagcatgcccagctcattttttgtatttttagtagagatggggtttcaccatgttagccaggctggtcctgaactcctgacctcaagtgattctcccgctttggcctcccaaagtgctgggattacaggcatgagccactgcaccctgtctgtatttgttttttaatcttgccacatcggtaaagaattttgctatagaaggaaaaaaagattggactaagtatgcactaacctcagttattatcttcctttatttttgtctggcgattatggggtggtaggaatgggacatactttttcaacaaacaaactggctgggcttggtggctcatgcctgtaatcccagcatttggagaggccaaggcggtcggatcacctgaggtcaggagtttgagagcagcctgtccaacatagcaaaaccctgtctccactaaaaatacagaaaaaaaaaaaaaaaagaaaattagccaggcatggtggcgggcatctgtaatcccagcgacttgggaggctgaggcaggagaatcacttgaacccgggaggcggaggttgcagtaagctgagattgcaccatttcactccagcctgggcaacaaagcaagactccatctcaaaaaaaaaaaaaaacactctgtttagcaccgaattagtgccaggcacttgctgagggctttatgtgcattctcctattatcactcacaacaaccttgtattattgactctaccttgtattaaaggtattaaatactcaaccttgtattaaagactctaagtattactagtataggtgaacaaactgggtggggcaccaagaaatatagtaacttgcccatcatcatggagctaatacatggtcaaatcaagacttgaatctaaggccaagagctacaaggatccaagtttttagccacagtgacatcatataaaatacatccctgcatttctctctctttctgtgataggcatctttctgcagaaatttaagtgcgatgaaagagtctaattaatagacatgtttattgaacactgcagaagcaggaggtatcaggataagactctccacttccatggaaagtgcacgtggctgctgaacatgggctttaggtgccttgtgagcagtcagtgccaataaggaagaagttcaagcgggggcagaagaattcccctggggaggtgattctgcagaactcagccattcacaggtcatgggagattttgttcccttcaggatacgtcagcttcacttgctgaagtaggacaaatagaatgaattagccctggctgaagccaaaattctttatatttaaaagaagaaaagcaattaaatactcagcccaatcctgggttttgaattaccccatttatctttcactctgagcatctgctttttattgcattgtggccctgcctgccatttatctccccctgtcagtctgtatccacgtgtcatgggactcaaaagtgaagattagaggagaaaaatatctctgtattctaagcctggcaacttctatttttatcctcagctgttggagctgatagcaaagtcacagctcacatccctgagtggcatcgcccagaagaacttcatgaatattttggaaaaagtggtactgaaaggtgagccttctgtcactctctcgccccttttaataggcttggaggtgggcagatgggttttccaatagagtggacatgtcattagatttaaagatgtgtgaatggatgaaatgaacaactccagctacatttcagaggcactaaattccagttcagaagggggtgcagtgcatcctcatggcaaagggtgagaccgtcgccctcctgtccttcctttgggaccatctacttgccctactaaaagcctcgtaggcttctcagtgtagacacaggtcccaacactggctcccgagcctccaggtcccaaattcctagaaaatcgacacgtgtacaaaatcagaatagattcgtagactattcgagctagaaggaaccttaggtctctggttcacctgactcattatacacatggagaaactgaggcccatgaggagaagtgatttgtccacaatcacacagagtcagccagacaggattagagcccaggctccaaacccctgaaaccatgctccttccactgactgtcctaaagggggggtcacttctgggcaaaaggagtggcttctgatcaggtgagccatggctgctgggagaacaatgaagagaaagaggctttatagaaaatgagagagaagagaacaaagagggacctagataatggaaactctaccttttgacctcaagtgcagaagtttggccaaccgtatagtaaacacgcgtgaggaagaaaaccgtatccccagaggcagtgcctgggtaacatgactggaatagagacagagaaaagctcatgtgtaaaatacagggtgttccagtatcataactttgattatttttttcttccccactcaagtccttgaagaccagcaaaacattagactaataagggaactactccagaccctctacacgtccttatgtacactggtccaaagagtcggcaagtccgtgctggttggcaacattaacatgtgggtgtatcggatggagacgattctccactggcagcagcagctgaacaacattcagatcaccagggtaagcgggcaggcccagcctcctcccagcagtgggttcctccacggagacactgaacagcctcgccaagactttgaattcactcccgggacagaagagtccggtcttttctgatggctgctttgtcctggtgctgagggcgggctgggggacctcctgataaagggaggtgggaagaaaaacttggcaaaacgggatcaaagtacatgaaagatggcagcctggtgaactactgtgggaaagctggaaactgggcttttggggagaagcagccccgctgctgaaatctttagcggggttcagagatgtctgtttgctcatttcctcagaaaggatgacttgtttgccactttaggttgctgtcttgaatataacagagctgggaaggcttggagaactggtaccagccttttaaaatcctagttccgattattggtagttatgacaaaggaagcctttgattaaagtctgcgagcttacatgtgggaaaatgatgagcaattctcaaagcacaaaggaaaagccctatattaccagtgaggtttggcgatctacagcagttgttccttttggctttcacaacctagcttggccctcagctcttgtcctcctaatagtgagcaggaggaccaaggcacaaaagaaaaaaaaggaagatgctggtgcaatctcttaggactcactaatggacagacacactcaggcggctcatgtagcactttgcttacttatctcatcacagactgtaactggcttaagtggtttccgggacccacactgataaaatttgaggttgcctcatatcaggagaaggtagcaggaagaaatcctttgactgcttttaaataactcttttactagatgaagtttttagaatgcatgttcatgactttactggtaattacctctctgtcccttcgctttttaagctgtgaaacagaatcattcgaaggctcagagttacgtgacttccttagagtcacgtaggttacaacacctacacgctgttgccacagacacacacgcagagcagagcacagatgcaagtcatctttcagaaatcatctcgcgtatttgatttgtttaagagaatgtacatatttattatgaacattcacctgattgattctaataatttaccccattcctacatctcaagtgtaggcacatagtctgaccatgtgaacgtgagacccaagttcccagcttctctctcacagaaaacccacatacacgttctacctggtttctggcgttctctatggcctggactgactgactaggatttttctaagaccaggagagaactgctaagccagtgatataaacaagcaggtcccatgtgtcccaagggcactttccttcagcaacttcagaacacccatttagatggtcacagttggccaggtgcggtggctcatgtctgtaatcctagcactttgggagactgaagcaggcagatcacttgaggtcaggagatcgagaccaccccagtcaacatggtgaaaccccatctctactaaacatacaaaaattagccaggtgtggtggtgcacacctgtagtcccagctacttgggaggctgaggcaggagaatcacttgaacccgggagttgaaggttgcagtaagccgagatcacaccactacttaccagcctgggtgacacactgagactgcatctcaaggaaaaaaaaaaaaaaaaggaaaaactctagatggtcacacttgcctggagcttgcctctgttccctctgtccacctccaaggaccccttctggccacatctgcccgcataccctgcactgccataggcttacatgctcagaacccttcttagctgatccaccaacgctcttcggagctagctgttgtagctgttgttacccctcttggagtggacgtggagtggcgaccagagatgcccagtgactttccaagcgatatacagcagttagggccagagctgaggccagaaccctggattccatattcctaaaatgtcaaagcttgcttgagtttccaaactttttcaatccagctttcttccaactatttatccaatgatccagctgtttaaaaaactctctttgatccaatgagatcccacaaagaagagatcaaacactgaagtttactcactatctcttctacatgaggaggtccagccaagccaagtcattctctgcactctccaggcttggccctgcctcagggttttgaagcttgctgccttctttgaccatccaatctatggacgtcaccatcatatcaccttcctctgagcagttatgatctgaaattgtctataatgtgtacttttctgtctctgtccactgggttataaactccacaaagaaaggacattacccatccattccctgttcctggcacagagcaggagacagtcagtaaatctgagttgaatgaatgagtggttgaaagggagtctccttccattgcctgcctgagtactcgttcagtgttcaaaagaacacagttggaaaacatggccctgtattatgaatgatgatgatcatttaccagctgcaggatttctttttttgagacagggtctctgtcgcccacgctggagtacagtggcacgatctcagctcactgcaccctccacctcctgggttcaggcgattctcccaccttagactccccagtagctaggattacaggcgtgcaccaccatgcccggctaatttttgtattttttggtagagacagggtttcaccatgttggccaggctggtctcgaactcctggcctcaagtgatccacccacctcagcctcccaaagtgctgggattacaagcatgaaccaccacgcccggccccaactgcaggatttgaggcaggttattcagtctctccatgcctcactttcctcatttggaaaatagttgcagtagtgtcaactcatagccatcatgtgagatttaataagttaatatatagaaagcaaatggcacagtgcctaatgtacagtaaatattgtaaacatgtcagctgttattattaagggctggctctgtgcaggccctcttctttttttttttttttttttttttgagacagagtgttgctctgtcgcccaggctggagtgcagtggccggatctcagctcactgcaagctccgcctcccaggtttacgccattctcctgcctcagcctcccgagtagctgggactacaggcgcccgccacctcgcccggctagttttttgtattttttagtagagacggggtttcactgggttagccaggatggtctcgatctgctgacctcgtgatccgcccgtcttggcctcccaaagtgctgggattacaggcttgagccaccgcgcccggcctaggccctcttctaagtcctttacatgtattgattaactcacctagtgaagaattgttaagtaggagtcatcacagtggctagcatttactgggcactacactgaatgcttctatgcattatctcatccgccctacccaacaacattggaggataagctttttctcatgttataaatgagaacaattagaacgagtagttaagaatcatttggctgaggcctcatgctcagtaggatgtaacacaagaactgaacccaggcctgtccacagaggctgtgctttcaaccactgtgccttcctcccgctgtcctctgtcccaaccctccttggctctgagctttcttatgttgagagctgtactggaacccacagagccttaaagggcttttctttttttgtttttgttttggttttttttttttttttttttgagacagggtcttattcccattgcccaggctagaatgcagtggcacagtcctagctcactgcagccttggcctcccaggttcacgtgattctcccacctcagcctcccaagtagctgggactacaggcactcgccaccacacccagctaatttttgtatttttagtagggagggtgtttcaccatcttgcccaggctggtctcgaacttttgggctcaagcaatcctcctgcttcagcttcccaaagtactaggattacaggcgcgagccactgcgcccagcctccacacagaagcttaactctccaggggaaggagaaatggagagaaagagaaaagacttaattacttcagtctggactgtattttaaaacttactttttttaacagtttgacccagagagaagtacattattacatgcaaatatgaagttgactttcagagtaaatgctttctattttgccaaaattctatcattctcctcccagcataaaatcttattttcctgcgaaatgttcatatctaattctatggagcccatttttactggcaaaataatataataaagaatgaaggaaagaaattaagagaact

SEQ ID NO: 654 - DNA, 32306 bp, Rattus norvegicus
  source 1..32306: mol_type = genomic DNA
atgccgttccttggtcaggactggcggtccccgggccagagctgggtgaagacggcggacggctggaagcgcttcttggatgagaaaagcggcaccttcgtgagcgacctcagcaggtgaggacttccacaaaaccgatcttagctgttggggggggggggggggcaagggggaggtgcgcacctcaggggcaggtgaagaagggcaagcagctctgggccagaataaagtaggggcttccggctgaagggataggagtgaggggccgggatttctgcaaaggtcaccagaatgtgagagatgagtaatttagtgtctcctactgatcaagatcagtgtcacccagaagaaaagattccatacagaacctggtacccctcaatctggcaatcggggattatgttcctaaacacttgaacacaggcgcacaactcacagactcttcctttagatcccagaatcgcacagttactgctttaagcggttgctagcgacttgactgtttgcctttcactgtcctgtgacaggacccaaagagtacaagaaccgtagtagtcaccagccggatgatgggattggtcttgagccctaccctgagtgcatgaagtctcttcccacgcacaggcgacggctgagtgggccgagaaaaaaaagagtaactgggaggggcagaggatgaaccctgggacaacagccctcctgggcagacttgtggaatgggtctttggggtaaagcttaggggctactgagggaggcaggaaagaaatgcgagaacaatgctctgcttcaggaaggcccagacacttgcacctgtttcctccttagccctttccagtcagtctttatacggtgagcacactcccctccttagtggtgcttgccagccgcagaaagaccacccagacttgaagtctcacctgagctctgtcatctagtggaaaatctgaggtcacaagtgcccactcataaattatgaggtcgagaatcaattcccaacctgaacagctgactccctgagacacctgaggaactggtagaagtttgtttgcagttgaggtcacctttaggtgctttcccctcccactgtcctttggctaacaccacacacacacacacacacacacacacacacacacctgcatccctaagctgacttcagcagagacttctgtgagtgggccaggtcccactgagtgagatttgccaatggttgtttgaataaagctttggcaattgtcaagaaactgtggttatgtgcgcagcgtgacctccactgtctcccatttgtttgtgatttgtaatgcttgaattccctttgtctcttaatgaggtgagacaaatcactgtacttggggccttccaggagaatcaaatacattagccttgtgttaggttctttgaggaagtcccagagaagtttagaacactataaagactataaagaataaagaaatcttattcacagaaaatcagatagtcaatcattgtctcacctgactgttttccagcgaatgaagtcaacagttatacctaatactttttcctcgactaagtgagtaggggatacaccagaagctttctcctccttggaaccaactatcttaggagcccgaatctaataccccagttctttgttcctgtataaaaagcttaggtttgctggggatttagctcagtggtagggcgcttacctaggaagcgcaaggccctgggttcggtccccagctccggggaaaaaaaaaaaaaagaaaaagaaaaaaaaagcttaggttctttccagggtgacgatgcaggggtccagcccactgcatcacaatgacttgtcccactaaaacaggataacagcccactgtgtttcagcaagctgggaactaaaatggagaaatcccagttcatctggtcgctcactccatccttgctccaggagacagaaatagggacacctcactctccctaatccaaaagatctgaagaggagttaaacctgcctctgaggcctggtggtgatggaggcctttaatccctgtacttgggaggcaggggcagctgaatccctgagttcgaggccagagttgagtttcaggacagtcagggctacacagagaaaccctgtccttttgtccctccctgatcccctttcttttcttgagtgtcacacctgtgagctgaagctatcactctcagtcatcatggtcccaacagtgatcaataccaaagccacctgcggttctctgctgagtcacagttgaggaatgatttggtcatctgcctcagcaaagcagctgactgtctgcaggggattttcccccccagcaaccataaacaatgccctccttccatagcagaagagcctgccaacttctcaaaagcagtggccttctgagtctgggtttgtgatctcagatagctctctgttttccgtcttggttttcctgtgatgtaaggtttgggcccagtgcctgactgcacaggtgagcttgaatggcctcttattctaagaaaacaaaaggcaggtccttcataaaagagggtgagtgactgtaaactgaactactgaggcttctctaattccatgcaccgtcctgaaagttgcccagcaagagtgaagaataaaggcgtcgtctggtgagattattgattagaggaaaccatggcttgtctgcactgtacacctgttatagactccactggccattgtttctgtggtccagggcgctgccctccaacagccaaatgttacagtctcagtagccaaattcctcctgacatagtagaaaattttagataagcttaaagctgacctcttaaaaagttgcaactgaacctagctgtggtggtgcacaccttttatcctggcacagagagaggcacagacacacagaggcagaggcagaggcaggtagatctgagtttgaggccagcctggtctgtagagcaagttccaagacagccagggctacacagagaaaccccatctccgaaaaccaaacaaaaagttgaaactgtaagataaagaagagatggccagtgttaggtttgtgtggcagattagaatttcaaggaaggagcactctatgagctggagccatccaagaatgcttcaaggaagtggtggttgagatgacccacactgcctcctccccaaccacccctgctccgccccaactccaggatgagtaatctcaactctcatagccaagcctgcacttctgctgttaaaagcccatcccagcattacatactgtttgttgctaagactggcccaggaaggaggaagttggccttgataccttgaataaaaataatagagatatttttacaagcacttaccctgtgcaggacagtattgtaataagcctcatgggctagcctgtttcccccaaagcaatccaggaagtagcctattcaggtttggcaacctatatatgactttgagcatcaaaatttcactggacataatcagggtgatataactgctttgggtcaggaaatggttttaagtatttttcttaattacaaatgaaatacaaaataaaactcgtttcccatcccctcctttgtctgttgcacaaatgttccttagtttattgtcttactttgaaaactttccaccacttctacagttgccttatagtattttatatgtgttaatggtgatgtgggtgttgtggggaaggactttttccttattcttggcctgtgcctgtaaacatcaagattagtaagaagtaattacaaagtaacaactcggggaatagtaagaagtggttactttagtagttacaaagtaaaaactcgaggattagtaagtagttacaaagtaacaactccttaactactattgcatttggtggaggaaaccagcccccttgacatggttttgcttattttaaatgcatttatatatatttatgtgccatgatttgtaaatggtggttgtttttcctgttaaatttttgagttgtaattttccattgattttgcatttcctggatcgagacataactgaagtctcaaaatagccactgaatatattattgcttaaaagaaaacataagtagacaacacaaataaactttacagcctggctcccaagcctccagaattcaaaccctgtgcttaaaacttttctacccgctgcatcaagacagcatcagcagtggttggagatccttttcacattggtttttgaaatgcgtcactccaacttaaagcagttccttcttgtatccatggagaaagccaaagctcaaatcccctcaaacgctttcctttataaggtcactatctgtgcctaaagctgctgcagacccatatgtatatggatcaaaataagatagctttgttttgtacttccctacatatggaatttttaccgtagtttataggccatacagactacaccaccatgtagtatggtgatgtaggctgtgcatctctgtgtatatttctttaaaaataagccttcctgggtattttgtacacagaatgttctatctctattttctgaagctctgggacatcaggggccactcgactgactctccatcttttcctctgcctcagctttgattaaaattctttaagacagcctctgagactcggagttctactgtttgttttgccccttttcttcctgctgtcctgaaacagataatccctggtcagtgactttgtaacccacccacccccaacacacacacacacacacacacacacacacacacacagacagagccatgcaagcagacagacatacccgggagtcgtacaaagcctgacccaaaacactcacccttggctcacttaagcaagtgcctctgagagaggtcatttctgtgacacccagtctgaagcctaaaaataccctgtttccctgaatgaaaaagagaaggctaaaaacattagggaactcaataaacggtattaggtatggctgggagaaggaaaatgaacggttgactgggggttcatcaagtttctccctgtaggttctaaaagcagcaccgggtatctgttgtgatcagcatttcaggaagacacttaggcaagtcttccttactgagacaccagttgcaatgaaagaaccctcggcactgtttccagtcttcttttcccatctatcatttacacaaagcaggaaacagaaaagagcatatatgcttactatatccatccccataaaaataaaaaaaggcacaaatcacgttttaaatcctgcagaggacatcagaaaaacttaaagtctcttaatacattagtggacacacgcacacacctaatttgtacaggttgctgttataaatcctgcctgcctcttgggattgaaggaggcagggaacccattctcccattaaattttagtatttcctccccatcatttttgtagaaagtattcagagaggtcccctaaatcaggagactagagcccttattcccatgacacctcagcttgctaaggcttgtcaaagttggactagcccatccttcagtgatctacaaattggattagtatatttgacatctttttagccccgctaagtttcccaccagagctcccagggactaaaccaccaaccaaagaatacacatggagggacccatggctccagccgcatatgtagcagaggatggcattgttgggcagcaataggaggaaaagcccttggtcctgtaaaggcacatttccccagtgtgtaggttaatgccaggacgttgaggttggaatgggtgggtgggagtggaagcatcctcataggagcagggggagagaggaggggatatggaaggggggaagggataacatttgaaatgtaaatacataaaatatccaagaaaaataaaatttaaaaaaatttctagtttctgttaggaaccaacatcttaaccctccagcctgagtcctagtgtcttaggtcagaaacctaaacaactagcatcgtattcctgcttgaaagggagtttgtaagtcagatgtttgtaattatgatcacgttttaaagacaggacaggaacatgctagtttagcagcctggttatccagtacatggatgaattgtataacatgtgaattatagcctagtgaaatcatttataaagagcaggatgtggtagcacacatcacaatcctagccttctctacacccagtattggggggcttaggctgaagaccactatgttcaaaactaccctgtactatgtagtatttcaaggccagcctgggctacgtagtaaaatcttatcttgaaaagaacagaagagggggaggggcaaaaaaagaaagaaagaaaagaacagaaagctcaagttgggcacagtggcacgcacctttgatcccagtgctgaggaggcaaaggcaagtgagtctacatgagtttgaggccagcctgatctacatagtgagacctgtctcaaaaaagagggaagggatggagggttggagatgatgggaaaggaggataaagaggaggcgagaagaagagtgggatggagggaggattagggagagggaagaaagaagcagcttggtgcagacgctctgtgtcttgcagaatgcaggcattgtgtggcacagtgacaccccctgttcagcccttttgtttaaagagatgttgtgatggcctgcattgctcttagagagtatagggctctgtatcaaattataatggaaagccctgttagagaattcaaaagaaacacatacccctatcccagccttccacatggaggtgatggtatttttaccagtagaaagaagtctgtctgcatggtttggtttggtttggtttggttttagatgattttattgtttggtcttgtttgggagacatatatgttggtgtgttttataatccagtgagttatttatagctctttagagttatcgttgctgccctctcctctcccatcacagttactgcaacaaggagaatctgttcaacagcctgaactacgatgttgcagccaagaagagaaagaaagacatacagaacagcaaaaccaaaactcagtgtaagtcatttgttttgaatataagaagaaaggtgtctgggaacagagctcacttggaagagtgcctgcctaggaagcaaaatggtcctgggttcagtccctgagtactgcataaattagacatggcggctctggcctgtcctcccagcctgaggatcagatgttcagggccatcatccttgctacaaagcaaatccaaagccagcctggggctgcctcaaaagagaaggaaaggctgtctaatggttctttcctttttaaaaaagatttatttatgtctatgaacaccctacttgcatatatgcctgcatgacagaagggggcatcagatctcattacagatggttgtgagtcaccatgtggttgctgggaattgaactcaggacctctggaagagcagtcagtgatctaaacctcatctcttcagccccgctgtttgacgattcttatgaatggttcttgaaaaacaaactagtgcctctcttattagacagctagctgccctgatgcctctgacttcactaactgaggtttcttgactgtgcattttccaggcaagatcagcatattctttgctgctcaaaagtcgttgcttgttgagtttatcctgcttgtcacttgcatgtgacctaagacagttacggtacaggaactcaaccagcggagttcattccagcagtgctttggtttttcaactgtgctgtgaggctttggaaatagaattgtgagactaaggatatagctcagtgctggcctcccaggctgaggcctgagtccatcctcagaactgaatgaactaggcgctgtggttctctgctctgctctcctctcagaagctagaagtggggagaatcagaagtttaaaaaaagataaaataacaaagggttcgggattagctcagtgagccatgggtgggttcggtcctcagctccagggagttggagaagtgtggggtggcaaaataacagatgttttaaaattgttcaagatcacatcagccacacagtgagtttgaggccaacctataatacatggactctgtctcaaaatacaaaaggatggaagaaggaaataggtgtgtccctcttggacaaatggtattcacgtggtctagatacttctatattagcagaggatataaggctctattaaaaacatgaattataaattattctaattgaatccactccgtctgcatttccctcatgtcacctgttctgtatccactttttatggtcttgtgtgagttttaggcttggcatttaaaacaaaggcactcgagtgttagattatctttttaatctggaggtttgggaacactacgtctgatatcaaagattcagattgctagttacagatccaatatttagaccccacagatattgagtatttttattctcttagattgttggcgaggtcttctttgtcaaaacattcgaactttggaattaataaaataatgagtcatgtttaaattcttggtaggcctgctaccaagttttctgatatatttctttttcctttttttttttttcttgcttctagatttccatcaggagaagtggatctatgttcacaaagggagtactaaggaggtaagtcaccatccatttactaaagccccatgcttagtaatgctgtaccttcctaagagagaattgggcaacaacagtcctttaattccaacagaagatgggagggtgtcggctttctgtcggggagaggagacagaagagagctctttggacttcggcttggctagagcttagctttgagggaactagccattaaattcagcaagccttttcagtacctgctctttgagctgtaggtaggtacaagaccttcctcaaatcatcctctatggcacgtgattgataaagcagacaatttgatccctaggacaggaggcaatatgatagagtgacggcatccctgtttctctcggggaccatggaaaacaccttgtttctctgtgacatcagacacaaagagagatcagtggcaaacacgaattacccagaaacttaggacaggacaagatgatatgccaaaacttgtcttcccaattctctgtacctctatactaaaagtccaaaacttattttcttcctcacaaagcacagggttctcaggggctgtggtgtggcctgcaggggaggcaagtagaactcattgtttaacccaaatagcctgtactcagttctgacacacttcgagtttgttagcacttccagactagtgtacgcagagagctagggtggtctaatcatgaagaggggtatccacaggtcagttcccaaccgatgaagatgtgggcggtaccacccaccttgtgtctcctgggactcagatgcaggaggaaaggcaaagcctgattgatgagtggccagtggttcagtggagtcctctggactgtactggagaatggcctctgtgtggcaggcgtaacgtatgcctctgtctctctcatgtgcagcgccatggatactgcactttgggggaagctttcaacagactggacttctcgactgccatcctggattccagaagattcaactacgtagtaagggtgagtctcaagagcccaagcttaccacactcttgaattggattgctagcattcgtgttgtcctgggaggttgaggtggggagagattgattgattgattttcatggccccaagagttctaagagtttcaggacaagcagaaaacaacttccccaaaccccaatacttgagggtagctgtgctgtcatttctgagatgaccccctcagacatggtgtgccataatttctcagtgaatctgtccatgggtaaggctaccccaagtgaaaatccactcctggtcctctcacacctaccccatctaagtagaaggcagcaacatcggtgaaggatcatgcctaaggaaataaaccccaaattaaacttatgtggaaacctaattgttctcgctctcctgcttcagctcactctggatcacatcagtcatttaggacacaaaatagttgagctcaacgcccctcggtgcggcccacccatgcctcccacctcatactaagtctccatctacactaagctgacacctcctctgtgatctgttgctttctattgcaaacctttggaaaatgttaatgaagtagcaggagtaagtttaacgtgactgtaaagctactgagtctatctgggtgatcgttttttcacgaacacatgcacgcacacacgccattggatattttttaccgatggttcaccctgggaggaagcagctgtttgagttaggtgagaggggaattttctcctgtgggggttgcttggtttagcttttgttttctttctctgggttgtgcagcttctcggtgcccataacacagtcagatgactgaagagactcagccaaagggatgacattcaagcccccttgaggcctggttcattcacctgtcatctgggcagatgcaggctgcctggacagagtgacctggcgaaaggccaggccttcaagcagcagattggaagccctgggctgagtccatgacgtatggcctgttctgtccactctctggctgagctactcttcagtccaagagagataaaaataagaacccttcttgggcaaaatgtccctgtcattcagcacgactccactggtctagagaggtcacctagtccttgcaatgcctgcaaactagtctggatgattggaaatggtcccggggagatctggaaacttctgttgctaagaatatgactagtttccatcatctgtgttaaaggagactctcggatctgatttcatgttacaaatcgatcatcagaatgatctggttttaggtggcttttctccccacctactttacttttcagaagacataaggcagagggtccagagtagaacacagcagcaaccatttgtcacctttactctcttcagtgttcctgtgaattgtgactgtttatgccatttccatgtaaacaaacggcacagccaggcaactgacttacccgatgtcacaggactgtagaaggaactaaatgtggccatgaaaagtgggcatccgtaagagctcatacttgtgtctgcttccctgggttctttgtaagcaagggctcaaagtaaatgtcctgaagtcagttgaattagggtccagttagagtccagttcttgtggcctggaagcctggaacacttagtgtcctttaaaaatgtttgccctctgttggtgcatctagttggtgagttgggaagtacatactgcactcaccagagctgtcctcacaagacagtgtgagcacgccggtagcacacagggggtagcctgttaagtctcaggaaggaggatccttgtgagcagctcatccaagaaggacaaccaggaaggagtaagtgaggtttgaatgggttttgagtagcagtaaaactcaaggagcctggagaaggcaagcagagctcctgtctgtccaaagcttactgagtagaatactccatctgggtgaaagtggccggcagacaggatcagcggaggctgttggcctgcttggtttacacatgttcctgggcaaacctctgtcatcccccctgtaaaatgggagtgatggtcatagacaccccaccctctcagaactgtaactggtgtggaagcagataatgtgtgagtccatcatccctaagaagtggatggcgatgatgcatcagggaaatacgtctaaaccaggaggtggatttgagaagaggctctgagtgcgaggcttctttatgtgatgtcatctggtagccaggaaggatctgtggggaagaaagtcagggaatagagaatgttggaaaggttattttagtaagtaatgatttagagcagcttctgacattaaactagttcccagctatctcccggcagtcctctgactccaaccctgtacatctgcttctctgatgaggtcaggctgttcagtgggcagatatgctaaactcatcttgaagatgggaaagcaaacatcagggaatcaagtgacttgtacgaggtgggcctagccaagaagagacgcagggcatccaactctgatcctctgtcctgtggtcctgaacttggtgctgtccacctgtatgctcagatggagaacttcagaatggagtctccattctttaatttggtgtgtgtgtgtatgtctgtgtgtggtgtgtgtgtgtgcatgtgtgtgtgtgtgcgcgtgtgcgtgtgctgtgtgcatatgagagcagacatgtactgctacaatgcatacatggaggccacaggacaacttctgagcagtagttctctccttgcatcgtgggttccagaattgagctcaggccagcaggcttgtgtgccgcaagcatgtttacctgttgcaccctcacacttccctctgcctcttatatcacacgactgtctgcatgcacatggacacattcacagggaaaaaccacgaggccaaaataagtttgaccatcggtctccattcttctatgggatgaacaagaccagccgcctggcaaccatagctgcaattatcaacccaggaaggccatgcagaacttgaatacccacttcctgactggggtaaactagcccctgtgtgctagtaatagaggaaggacaaagaaagcctatcaccctacattctctgtgtccctctgcagcaaagagcatccccagctcaaagcacattctttttaccaccctaagtccatttgaatatttctagcaagttgctgcattccttcaaccccccaaaaatgcactttccaaaaaacatgtttcagtttaagtcgatgggtggtttggcaaacagaagaccagctacgagccaatgagtcaaatttaaacccagtactgaaattaagggcatgcggttgccaagcctcagtgggttgtgagatgcataatagaccggctctccatgcaggtccctcggccacagtaaccttggcttaaattggtgcttttacacacttggcggccttcctgaggtggaagggggcctcagccatcagggccttaaagctgctggtgtctgacatagcaggaaggaggccagccactgcaggggcagcaaggctacagagcagcaacatgactctctctggaaatgactctcagaaatgattggagtggccgtgcttccatatttttctgactgacttttcttagcctgctttcggaactactggctcaaaaacatgttcttttttgtggggacccagaatctaaacacataggaacataggtcttagaaatatattttatattgaagtccaccttggattctaggttgagtcaatacttacctcagaatgaacaggcgaactgaattttaagtgcgagtgtagtgcccatccaagaaggatgcttgtgaaggaaccgatgctatacgtgacttagaattcgaagcctcctgattctgtgaaaggtctccaatgacaagggtgaaagagttgacgtcatgcccctgcttcattctggacgtggcaaaatgcttcaagtgaatacttttgaagccctgttctgtactgaacccaccacgtgccagtgcgcctcggcccttgagaaattctcgggaccttgcctctgctgtcaggtgtttttacaactatgtaagcaattggttggttgggtttggtgctgtccaggagtgctacacagaacttctagacagaaggagtgcctgagatgcttccttcaagtttggccaggatttggccagacggagaggcaggcagaaggctttcaggaacaaaaggtgtgtgcagaaacctgggattgaagcaaaggagagtggtagaaacttgaggccgaagacatcacatccggcctcacgggagcatagggagacgtggggcattgtagactaaatgaggctatgctggaaggattggggaggctcggggtaaccagtggcaatgagtggtaaccatggctgctcagagatatacagcagaaatcagggaccctttgtaagttctgagacagtcgaaaggtggagagacaggtttctcttggctgaggatacaactaattcacataaacttggccctcctccccattttaactctcttagttcaagagccgtttcacttgcaaataatatttacccaaatcttgacatgcctggagattattaatgtggctgaaatttttcttcttgcaacctgccagtgttcaagctcaaagtcagggcaaaactttccaggtatgcgatctgtgttatccattggataaataaggatcttggacgtacacggtactcagcgcaggcagtggcgctgcctagtgtaactgaaggctcgttataaatgacgctgccttccagtggacacccagcttgggcactgagcacgtgagacatagcccttgatcatgctggcagattttccatgcaaggtatggagttcctcttcccgggagacgaaggagtgtagacacaactccatccttttctcttattgattgcttgtttgtctttagacagggtctctatgttaaccaggctggccttgaactcacagaaatccacctgatctgccttccgagtgctgagattagaggagcgtcccatcgcacctagccaagtcacaagtacattcttatatagtctttttgaattttctgagatagggtttctctgtgtacctctggctgtcctggaactggctctgtagaccaggttggcctcaaaaccaagagattcacctgcccctgcttcccaagtactaggattaaagccacacaccaccacacccagccaaaaacacaaatacattcttatatagtcttaacaatatgtcttgagagatagaatgtatatgattgacctccatttggatttggccttttaaactgacaggaaacagaagctgctatttttaccaatactcctgaaggcttgacagtcagcttccctgtagaggtggggcttgcttgtccttcagcgagtgtctgagattttttttccccatggtaggtaatttccttctcagccctctgtgcagcacctggatcgccattctgacccaggatgacctctaacctgaaagttcatgaaatgtagaatcatgtcatttaactatcccaagcaacaagacatccaggccaactctttcccgatcccttccagaagtcatactctttgactctcaaagacaaatgtatttaaaaaacaaaacaaaaccaagtgcgtgtggaagtgactggcatgaactaggcagaggtgaaatagtaaacctggttccttttagggttttaagggagagcttctgattggacaagcagcaagtgtgtgacgctcagggaagctgtgcattaagcaacagtgaagggtcaggaaagttagatgggggagggcggcggaggggcttcaaataagatgtcaggggtgatacctctgaactccatctgggcaacatttgaactaagacctgtggatgagatggagccaagcatgtaaagatatggaagagacgcgagacccacaaatgggaatgaacttgacctgtccacagaatgccgccgtcggactgtacagcagagacagaatgaacttgggggccactgtacaaaagactgggagaggacaggaaataggtccaggaggaccttgtcagttgtgaaaaggagcttggggattttcccacatgcagaggaaaagcatctgaggattttgagtggggaagtgacatatttttttttttaaatattagtgctaggctagcaagatggtgcagctggtgaggcacttgctaccaagcctgacggattcaattccagaacccacatacaggtaacagtagagaaccaaaccaactctcatacagtgtttcttcatgtgcactcacatacgatggtacacacacacacacacacacacacacacacacacacacacacacgtatgtgtgtgtattaataaatttaagtgctatactaggatgaattgcagaggaaacctgtttccagtaaagaatggtgggaagtaattaattgcttttgcccagtgactctccaatcatcacatcaaactgtagatgatatgcactcttgcactctgagatctgccacagttggctgttgggataacagcttgcaactagacttttttccgctccatcatctccaaagccagcacgagctgaggctgaagggcaggatgtggtttgggcaagtcgtggccacctcctccctccggtagaagagcttcgctctttctttgcacagtgagtccctgcacacaatggcagatccccacactgcctactcacagggacaccatggcccccagggacagcctagggcttgactcccctgttcccacacctctgcctctccttcaacacagccacaaattactggcacctgagctaaaatttgctgggagaaaacagccacttccaaacattttcctctgctctcctttccctgtggctaagggcaaaggatgtagttggctcagtcgtcttggtaaacaaagtactggatacgatctattctctggggcaaacagctctcaacaacaaacatgaccgacagattcttcccatcattaatatcacgtggcactgccatgctggctcttggcagtaagctgtattggtgtaagagggagactccttaggcaacccaaaaccattgcctcttcctaaatgcgtccgtaatattatctgatcattatttcacctcggcatggaagctgatctccaggcacagaacagtgttggtgtaaaatttccagattctctctgcagattgtaacaagtcatgatgttcccgcaattgttcggataaaaatttggccctacgtgctgaattattgattatccaaatacatattcccagttagacatatctgggctcaagtcttgactcaccaacttactgctgctgcttaactgccctgagcctcagagtcttcgttttgccaactgggaacttaacctctttggcgttgaaaactgagaccagataggtgaactgtgtggcaccatctctatgcacagtaaatatccgtcgtctttagcaaagtatgacttcatggttgaagcatctctacaagtcatgacacgtatcagcagagagctgttaaatgcatcacaaatgtagtaacgatgtcagaggaatgttaaagcctgaactcacttagttgacgacaggtacgactgaaatatagtctttaaatgagctataatttaccttagttgttccctatgttctgcccggcaatgattttaccaagctgtcttttctgtattatgataaaaagctgtgataatgctaagtttattcttggtacctagcacttgtgagtgcttgatagtggatctatttgagcttcacaacaatttttaaggaaaggatatcactatacaaaatttatagataggaaaaaatgaagccagtagtttgactctgggaccttcgttatactctctatgatgtgtatcgcaagggacctcaggaccacatctggcccttcatttatttttgtaaataaagttttattgatacacacaagtgtgcacattaatttacatgttgtctaggactgcttttgtactacaactgcagagcatttttagtataaagactgtataacccacggatcttaaaatagttactatttggaggccaagtatggtggcgcattcctttaaccctagcacttggggatgcaaaggcaagtagatctctgtgagttcaaggccagcctcgtctacagtgtgagttccaggacatccagggctattacatagagaactccttccttaaaacaacagaaacaaacaaacaaacaaacaaacaaacaacaacaacaacaacaacaaaacagttcctatttggccctctagaaagttcatctactccagatgtcaaccttaaacttccctaagagacccggcattggggaggagaataattttaatagtgataataacaccttatgtttggtactcacagcaagttttgtttttctctgtatctcgcttgattctcataacaatcctgaggtagtttttgctgttgccgttcaggtttgggtttcctgtaggtagtcgtctttttattgttgttttgtgtttccctgagggagtctttttattggcattagaaacccaggaacaagctagatggcacttcgccatccccgtcatctgcctcagtgctacaggagattcttgctaaatgaatgacagttatagaaaggtcacccagacagaggatcccatcctcctgttccagggcccctcagctgcctagcaatgaaagctttccctgaagatatggtgaaacagagaggagatcacctgtcaccctcctgtcacccgctagtttgctgctctgtccctctccctcctcaggtgataagctcagcacaaagagctctttgcttcccctaaacgtagagtggcagaggtttcttagctgtacaggcagggcctgcagcacagtcttttttattttattttttccttgtgattggtgcccttttagatgagattaagactgacactctggggagctgggggtcacatggcacccgtgttttggatgcatttctggctgatctgaaggctgccccctgcctcacctcctacccaaggatgagtcacagctctcagccgcccgccctgcaggagcaggctccagacctccaggctttctctgtctttcatctcgctttatgctagtcatgtgagtgaggctctgggcattaataaaccatcagcctggccttctaagcctgctgttgctcagggagaaaatgaaaggtttgtgttctttttccactgccacacgctgattggtggcagaactgaaccaggcaggcacagagccctgcggtcactatgcatggacagagcctccccaccccctcaacccccacgccacaaccggggactgttgtgatgccttgcctgtcagcatcactcttgttggctcctgacttctaagtttaggtctccagcactaagcacaacacagcagtgtttcctcctcctcctcctcctcctcctcctcctcctcctcctcctcttcctcctcttcctcctcctcttcctcctctccctcctcctcttcctcctctccctcctcttcttcttcctcctcctcttcttcttcctccttctcttcctcctcctccttcccctgaacatgtgaaagataccacatctagcacgaaggcacgcaaggttcagaactttttgttttcaatttaaagtaaaattatattcaaggaactaggtctgtctgtgtttgacaacggtccaaaggactcaataaagacaaatgttttaaataagggcctgggacaatggaggtgctctgaaccacgtaaggctgtggctctcaaccttcctaacgctgtgtgcgaccctttaaaacaattcctcatgttgtggtgaccctcaacccatagaatgattttggttgctacttcctaactgtaatttgctgctgttatgaattgtaatgtaaatatttttggagacagagagttgccaaagggtcatgacccatgggttgagaaccattagtgtagggcacaggtccaaagtgagtcccctgcagtcctgcttcagtccctgtgttctcatacagtttgtttttatacggcagagttttagattcttctttgtttcttcccttgcctgccttgattccagcatccgatatggtatctacgatgccagtacagtgttataatgtcttttctttttgtttgggaataatgggagtaatcgaaattaacataggcccttgacaacaaactgaacgtacctagcatctaactcacatggggtcctttggtgagggttccttgtatactctctcactgaaagctcaccacctcaaagaccctgaacattattcataaagataaagaacccacatagaaaaatatatttagaggcatgcccataatcaaagagctgagaatttatccaatcaaggctctattgcagggagctagagagatggctcagctagcaagagcatttgctgctcttctagaggacctgggttcagtttgagcacccatacggtgactcacaactgtctgtaactccagttccaggggatctaatgtcctctcttggcctccattagcacaaggcagacatggtatacttgcacacataaaataaagttttaaaaaagattgtgtcagagctgacagattctagggttcttctttgagcctctgtggagaggcagatgcactatacaccctgtttctcttccttgacatctatttaaaaagagagagaggaatctaataatcaggcaaggttattgaacatggaaagcaggtactgtctaaaaaagaatcatcccctccttgggacatacaccaaacgtgagctttgctgtgccctgagagcagtggacgaaggttcaagtcggacaaggacagatccccctgggggtgattatgcagagctctgctgttcacaggtcatgagaggttctgttccctttggaatagtgtcagctctcctttccaaagtgggctgaatagaatggatcagccctggctaaaccccaaacccttgatatataaaagaaaaaaaaagcaattaaatattcagcctgactcctggttttgaattccacccatttgtctttcactctgtgcatctgctttttaattcctggtggccttgccttctctctctctctctctctctctctctctctctctctctctctctctccccacccccatcagtcatcagtctgtatctacatgtcatgtgactcaaaagtgaagattagaggaaaaaaatatctctgtattctaagcctggcaacttctatttttatccacagctgttggagctgatagcaaagtcacagctcacatccctgagtggcatcgcccaaaagaacttcatgaacattttggaaaaagtagtactgaaaggtgagcttcccctgccctctctcggccctttttctaggtgtgggaataggcatctcaagtagatgtcactgggtttaaagacacatgcgcctatggaagtgaagactgccagctgaacctcaggagtaaagcttccagctcagacaagcggtgccacccatgcccttggcaaagggcaagagcactgcccccttgtcattcctctaggatcatatgtttgccctacttcaagtttggctggcttctcaatgaggacatgaacctcaccctgcaccatggagtttctatcttcccaagaaatggagctgtgcgcaaaagcagaattgaggcataaactgaactagagggaaccttaagacctctggctcgactgagtcatgtcacatataggggaactgaggcgtatgagaaatggttgtctagagaagtgacagacagggttagaacccaaccttctgaaccccaaaactgcagtcttctactgatctagaaagatgtcatcttctgaacaaaaacaccgctttctgctcaggtggacacttggcactggtggggcaatggaaacagaaacgagttctttagaaacccaggagaagggaacaaagagggacccagatgagagaaactctacccattagccgagtgtagaataaacactggcgagaaagaaagacagaggcagcactcagtaacaggagcccacaggggagaagaaaagcccacttgtaatatgcctggcttcagtaacataactttgatttcattttttccactcaagttcttgaagaccagcaaaacataagactcatacgggaacttctccagaccctctacacatccttatgcacgctggtccagagagtcggcaagtccgtgctggtgggcaacatcaacatgtgggtgtatcgaatggagaccattctacactggcaacagcagctgaacagcatccagatcagcagggtaagtgacccagccaccccccatgccatggttccctccacttagccaccgagcagaagtccaggactcagtgatacaggagctaaggcacttctgatttgatgcctcgtcccggagggtggcatgaggggcatccagagggaggggagtgggaagagaaacttggcaaaagtaggtggaaggaatgtgaaggataacagacaaccggagcatcgcgcagaacgacgttgggggcagggtgctggctgtcctgctgaagtcttcagtgtggcttgggggagctctcctttcctcagaaagaatgagctgtttgtggattggggttagtccccagaagacaggcttggagaactggtactaccggccttttaaaatctcagttccatttattggtagtgatgacaagggatgcctttgaagcaagcctgagcgtacatgtaagaaaatactgagtcagactcactcagagcctgtaagttattggcatagggccacatgtatcagacctttgtttcggctttccgaattaaaacctcattgttggctcccgtcgtcttaatggtgagcaggaagacttgagacatacagaaacctgtgactgctattggtgtgatctcagtctctccggtggacaggcacactcgggagcctcacaggacacttagcttacttatcttatcagaccctgggctgggtaagtggcttccgggacccatacagtttggaactgtaccatgtatcaggtgaaggtgacctgcagaaagccgtatggtctgttgtaaatagttgccatgtgacagttccaaaaaaaaaaagcattccctctttacaactaatgatttttctgtgccttggtttcttaaattctgaaagatagaaacctctacgtggcttcctaagagtcacttaggctaaaacccacacttgtgagcacccacgtatccacgtacaggcacacacatgcacgcacacacatgcacatgcctgcaaacacatgcgtgcacagagcagagcccgaatgtagggcacctttcagaaattagccccactgtcgcattgttttaagaaaattaagcatgtattatgaacagtgtgatgtaatgatttatcccagtctctccccaaaagaaaggcagagcttaacattgtacatttaagaccagaattccatctcacacacaaaaaaactggagcagacctgctacatgatttctagcattctctatggcctgcactgaatacttccccaaagaagtatttcccaaagaaaatttccagccagtgacagaaatgaacaaggcccatttgtcctaatgacagctgccctctagcaactttggagcatccatttcgatactcatgcttgccctgagctctgctccctctggctacctcagatgagcatgtcaactacactgatagcccattccttgtacttctgtgtcctttcttccttaaaaccctctttagttaatgcccaaacactcttgaaaagcagccgttgtaattactattaccctacagaggctggcattgaagtggggaccagagggttccagtgaccttcccagcctacacagcaattcggctaagagctgaggtcagaagcttggactgtttattcctaaaatggcaaagtgtgcttagcatcactggcttccaaacgtttccccgtctagttcccttccatgtatttatccactgatccagcttatttaaaaaaaaaaaaaaaaaaaaaaaaaaaaaaaacctctttaatccaatgaagtcttctacagaagagatcgacactaacgtgcgtctcctccaacatctgctttagatgcttcagagaccgccacacctctacacattacatcggggtcccttagctcctagccttcctggcccagcccaactcttaaagcccctatcactcattcttcagaaccagaaccactctgactaggtaaaatgatctcgtgcacatacacgtctgtctctacccactgctttatagttttcagatgaaaagacactgtcatctcctgctctatacctggcagaggcagtcagttgatttcagtcaaagaggtgaatgtttgtttgaagaggcagctccccaccgctgcctgctgaagttcattttcagggctcggaggggcaggattggagaatatcatcctagattctggatgacaaagataagttagcaactgcaagatttggacatagtattcagtctccccatgcttcgctttcgacctttggaaaacagagtctgagatgcccatctcgtagccctgtgtgagatttaacatgagtttgcataaactagtgtacagacagcatctggaacagggcctggtatgtggtaagcattattatagatgcattaggtgttatgatcaaaggcttgcctgcacacacacacacacacacacacacacacacacacacacacacacacacagagtaaatccttcccatgtgataattaacttatccagtaattaattgtaattaagataaatgaatgaaatttactggccactgtgctgagtgtgtctgtacatgacctcatcgcttctacccagccacatttcaagattctccttcccttgttttgtaaatgagaaaaatcatcctcagtgtccacaggggatagactcaaaggcacccgaggatgccctggatgcaagggtcttgcacacagcacacagtggctaatgaccatgcaatagcctgcacacatcctcctcggcactgcgggatcacctctagccccattgtaaaaccttgtaggatgctctggacataggacaggagcacaagaaaaaaagcctgcacacagtcagtacaaatgcatctttttatgagtatttccatctgtggcttattgagttcaaggatatggaaaccaaaaacatggagagcagagtgtgactgcactggggcctctacacaggaggtctggcatcagactccaggttgctcaggaagctacacttttaactactggtcctttctacactctgtcctcccctgaacccactagggggctctgagctgtattgttctgagagcttaaagaaaagcatcccacataaatccccgctcttaaggggcatggcagctcaggcctgtaatctcagcacacttgggaagcggagtcaggagaacgggaagttcaagaccatccccaactactaacaaatctgaaaccagcctaggctatgagatcctgtgggtcatgggaggggagagagggaaggcagggggtggggagaaaatgagaaccctccacttcagtctggactgtttttatatttgtcagaaagagaagtatgttaatccatgaaaatattcaagtgtctttcgtagtaaatgcttcctctgtgcccaagtcctgccaccgttgtcccagcacataaccttgtttgccttagaaatcttcatatctaattctttcaagccaacttttattggcagacataatttatataatgaaggatgaaggacaaaattaagggctctggtttgtaggaaaaataagatataattatggtgctgtgggcaaagcagtgttttggaaaatgggagctggggtagacacaaatggagtttagccaactgcttgactggggctgcaagagtgacgtacttttccttttatatgtttatattcaaaaggaagaaggcatgcaagcagttaaccatttatcaggagtaagggcttggcacgaggtctgggcaagggttttggaaaagttcaggtttgaaaatttgacagagcaaaactctgccaagcaagtgtgcctttaatgggagttaatgtaataattggcctgggagttttaaccaaaaaagtcgaggctttgaagtgttggaaacaaaaagaaaaccccatggcagttttattagctcttatgatcaacagcagatgataaacggcagagaggtcgagggctttctgcagcaataccaagccctaaatgttacaaacaattgaaagttgagcccaacagcctggggtataagagagcagtaaaaactgtcaggtcacaggcacttctgaagaaacaggaggcctgagtccactgcaggtccaagatcatgggagctagaaggatcgttggcagtattctaaacacaggctttgggagctgggcagactgagacccagtctcctcaagatgctatttgcatctgctctttgcccacgtgacaccctcccacgtgacaccctcccatgtgacatccattcttctcactacccgcttaagcccctctgtggcttcccactggtacctgtcctgactgcccagggactcagatgattgccaagacaatgacactgacactgacacagtgaggctggtaccaagaaaaccctggagtctcccatgtgatcgggctctgctctgcttcctacagtttctccccccagaaattggatgagaaaaataatccctattcccagagcattattttcccctgcacagctctgcacctggtcacagtaaatgccacaagggctctttgtactggactagtctctaaggcctccaaggtacacctgctgtaggtctaggtgaggtatcttgagatcattaaaatttaaaataagaaaggtcttgcattaagcttgggggtatagaggaggttccttcaaaagctcctggttgattgcaggtgaatactatatgtagatgagctgtttttaaaacattccctgcaggggctggagagctctctcactgttgctcttgcaaaagacctgggttcacttcccaccacccacccacatggtggctcacaaccatctgaactccaattgcagggatctgataccttcttctgatctccatgggctgcacatatatacatgcaggcaaaacactcatgcatgtagaataaataaaggggtttttaaaaaattaaatgttccgtgatatgaataggactgcctcagttacagcatagcttagctcaaagggtttgggggccaaccattcccagtgtgtacaaacagatataaacacaaacatatacagaaacatgcatacatataaactcaaacggaaacatgcacaaacccacatacacacatacaaacacacacacacacacacacacacacacacatacacacacacgcacgcacgcacaaacacagtgtctctgcgttattcttgtttaactatttggatttttagtccattgcactaatatttttattaagtgcttatgatgttacaaacaccaaaacacaatagggaaacaaagcaaaattcctgctgtccagaggtccttaggatctgaaaggaatacttaactgggtgtttctttttttttttttattttattaacttgagtatttcttatatacattttgagtgttattccctttcccggtttccgggcaaacatccccctaatcccttcccctccccttctttatgggtgttcccctccccatcctccccccattgccgccctccccccaaaaatctagttcactgggggttcagtcttagcaggacccagggcttccccttccactggtgctcttactaggatattcattgctacctatgaggccagagtccagggtcagtccatgtatagtctttaggtagtggcttagtccctggaagctctggttgcttggcattgttgtacatatggggtctcgagccccttcaagctcttccagttctttctctgattccttcaacgggggtcctattctcagttcagtggtttgctgctggcattcgcctctgtatttgctgtattctggctgtgtctctcaggagcgatctacatccggctcctgtcggtctgcacttctttgcttcatccatcttgtctaattggatggctgtatatgtatgggccacatgtggggcaggctctgaatgtgtgttccttctgtgtctgttttaatctttgcctctctcttccctgccaagggtattcttgttccccttttaaagaaggagtgaagcattcacattttgatcatccgtcttgagtttcatttgttctaggcatctagggtaattcaagcatttgggctaatagccacttatcaataagtgcataccatgtgtgtttttctgtgattgggttacctcactcaggatgatattttccagttccaaccatttgcctacgaatttcataaagtcattgtttttgatagctgagtaatattccattgtgtagatgtaccacattttctgtatccattcctctgttgaagggcatctgggttctttccagcttctggctattataaataaggctgctatgaacatagtggagcatgtgtcttttttatatgttggggcatcttttgggtatatgcccaagagaggtatagctggatcctcaggcagttcaatgtccaattttctgaggaacctccagactgatttccagaatggttgtaccagtctgcaatcccaccaacaatggaggagtgttcctctttctccgcatcctcgccagcatctgctgtcacctgagtttttgatcttagccattctcactggtgtgaggtgaaatctcagggttgttttgatttgcatttcccttatgactaaagatgttgaacatttctttaggtgtttctcagccattcggcattcctcagctgtgaattctgtgtttagctctgaaccccattttttaatagggttatttgtctccctgcggtctaacttcttgagttctttgtatattttggatataaggcctctatctgttgtaggattggtaaagatcttttcccaatctgttggttgccgttttgtcctaaccacagtgtcctttgccttacagaagctttgcagttttatgagattaactgggtgtttcttaaggggaagaggttgtgcagaagagagagttgcagacagccatggaggagcttttagcaattcttaggaaggtgcggtgaaggagacctatgggaaacacatacacagaaatggtcatcagaggaaatggttgctttttgtttcgttttgctttgctttctttggtgtttggatttttgaaacgtggtctctctctgtgtaggatagctcctgactgtcctagaactctctataaactcctagagatcctcctatctctacctcccaagtgctgggattaaagacatgtgccaccatgcccgatggaaatgggtttgaagtgaatctgagacaagagacggccaggaggggtgagggcactgtgcacaggtagtcgagatgtggtttgggtgccagagaatataccgaaatggaacaatctgaggtcacagaggatggtgagatgggaggccaagggtctgcccgggtcacccgtcctgggcagtagcacttttggaaggtagcgagtcttgcagcttaatagtgaagtgaatgaagtataagaatctgccatgtttccatgcactgggcagtggatggccccatgccacgcatggatggacagtgggtggctcacaccatgcacatatgggtagtagatggccatacaacatgtatatatagacagtgggtggcctcacaccatacacatgaagacagtggatggccccataccatcacagcggatggccacacaccttgtgcatagggtcggtggatggctacacaccatacatgtatgggcagaattaattggacttagtgggttgtcaaacaaaaaaaaaaagatgaggtgatagagagatggctcagtggttaagcgtgcttactgctcttgcagaggatctgggttcagctcctagcatccacatggcagctcataaccattagtaactccagttctaagggctttgtcgccctcttgtaacttctacaggcacaaagcatggatgtggtgcagttacagacatgcagacacatacacagaaaataaaaacaaatcatcaacttgaagttggggagggacctgttagggaaagataccagggggttaggggagggaaattggatgaacagtttcattctatacatccatgaaattctcaagaataaaggaaagtatagccaggctgtgctggcacacgcctttaattccagtactcaagaggcaagaagcaggaagatctctgagttcaaggccagcctggtctacagagcaggttccaggacagccagaaagatctacacagagaaactctttccccacctatatatatatatatatatatttccatcatgtgctatttagagagctctttagagcagaagcttgcaaacacaaggaaagcctgctggcagccatcatccaagccactccaggctgttctctgggagaccctgccatggctcccgcttctacattgaaccgggagcattactgcttaggaatctagtagtagattggaagagcaggacattctgggagcaagctgcctggaaaatggcacttttttgcttatcatccacccttctctctgcagccggccttcaaaggcctcacgatcaccgacctgcctgtgtgcttacaactgaacatcatgcagaggctgagcgatgggcgggacctggtcagcctgggccaggcagccccagacctgcatgtgctcagtgaagaccggctactgtggaagagactctgccagtaccacttctcagagcggcaggtcagtgaaacccagtggcctgtccctttgtgttccctgccctgacccatccctctccagcatgcggtgccccccaacattaaaattgttttcattgctactttacaactgtaattttgctactattatgaatcgtaatgtaaacacctggattttctgatggtctaggagacccctgtgaaaggggtatttgacctgggtggtcgggacccacaggttgagaaccattggtccgaggcgtttctaagtcaatgtgaggtttttactttttggttccttgttgttaccatcattgtcttaatagaggaaaaagaaatccctaacccagtttatattttatggatcaccccaaaatttcacaaatcagtatttcctcttttccttaaaaaaaaaaagggagtgggggtggggatttaactcagtggtaaagtgcttgcctagcaagcgcaaggccctgggttcggtcctcagctccggaaaaaaaaaaaaaaaaaaggacattttatgctgctttacattcaagcaggtttataaacattacttccttttatccacccaccaaggaagtgtagatattgtcatgcccacttctaccaggcgaagagaccaaggccacaaatgaccagtgtattcaaattattgaaatgactctcagaatgcaacatttgaattggacctgtggacaccctatcaacgtgttcttcctcatgctgccacagggtttttctccaattcttcatatgtgtgcgttcatccagtgggttcttttcatgactccactggtacttcaatgtaaaaaaagccacggtgctaataaccatgtcttcgtagaaataatcactcaggtctacagcaaagaaaacattgaattggcttctgggcgtgacctaagctttgaaggagcagccagaagcatcataaatacagtcagtaggaaaaagaaatcatagctacctgtttgtttggagagctgggtacgcagtactgtgagtgggaagagctaaggaagtgtggctttataacttgagtgtttctccatttcatttttagatccgcaagcgattgatcttgtctgacaaagggcagctggattggaagaagatgtactttaagcttgtgcgatgttacccaagaagagaacagtatggggtcaccctgcagctttgcaaacactgccacattctctcctggaaggtacgggtctgtgctggcttgacacaagctaaagtcatttgggaagtgggaccctcgatttagaaaatgtccccaccaaattgactggtgggcaagtccatgtggcagtctcttgattggtgattgatgtagaaggacccagctgactgtcagcagtgccactcctgggctggtggtcctgggtgctatagcaaagcaggctgagcaagccatggggagcaggccagtaatcagtgggtgaagcctctgcttcagtccctgtctccaggttcccgccttgagttcctgccctgatttccctgagccagaccctgaggcagcagtgccagcaacatgaggctggctgttcttgcctatctcagcccccaacttatgaggagagtaaaactcattcaatacttggacagggaaggaaactcaaagactttcatcccctctaccccttatattgatttgtctctgagacctgttcaccatctgtctttgtatgcactgtaggcaagcactaattccttagcttcacagagccttggaattctggggggggggggggtgtcaat

SEQ ID NO: 655 - DNA, 6465 bp, synthetic construct
  misc_feature 1..6465: note = Synthetic
  source 1..6465: mol_type = other DNA
agcactcccggagcctgcaacgcttgagatcctctccgcgcccgccaccccgcagggtgccccgcgccgttcccgccgccccgccgcccccgtcgcgggcccctgcaccccgagcatccgccccgggtggcacgtccccgagcccaccaggccggccccgtctccccatccgtctagtccgctcgcggtgccatgccattcctcgggcaggactggcggtcccccgggcagaactgggtgaagacggccgacggctggaagcgcttcctggatgagaagagcggcagtttcgtgagcgacctcagcagttactgcaacaaggaggtatacaataaggagaatcttttcaacagcctgaactatgatgttgcagccaagaagagaaagaaggacatgctgaatagcaaaaccaaaactcagtatttccaccaagaaaaatggatctatgttcacaaaggaagtactaaagagcgccatggatattgcaccctgggggaagctttcaacagactggacttctcaactgccattctggattccagaagatttaactacgtggtccggcctgccttcaaaggcctcaccttcactgacctgcctttgtgcctacaactgaacatcatgcagaggctgagcgacgggcgggacctggtcagcctgggccaggctgcccccgacctgcacgtgctcagcgaagaccggctgctgtggaagaaactctgccagtaccacttctccgagcggcagatccgcaaacgattaattctgtcagacaaagggcagctggattggaagaagatgtatttcaaacttgtccgatgttacccaaggaaagagcagtatggagatacccttcagctctgcaaacactgtcacatcctttcctggaagggcactgaccatccgtgcactgccaataacccagagagctgctccgtttcactttcaccccaggactttatcaacttgttcaagttctgaatcccagcacatgacaacacttcagaagggtccccctgctgactggagagctgggaatatggcatttggacacttcatttgtaaatagtgtacattttaaacattggctcgaaacttcagagataagtcatggagaggacattggaggggagaaatgcagttgctgactgggaatttaagaatgtgaacttctcactagaattggtatggaaaagcaaaatactgtaaataaactttttttctaacaatttgccagcaagactataagggcaataattctatttcagcggtgaaaatggagtcctcttaatggtcacagaaactctcttatagttccctaggaagaaaaaggcaaaactcaaatacaaaataggacgctttgtttacaatgtgaaaatttgtttagaaaagaaaaaatgaagaaggaaaactatataggagaaattcctgggctttggggtttgatctggtgtttgttttgagaaggcgaaggaagcgccacccatcctaaacctgcatgggcacagagccttaccctacagagataccacacaatggtctacctctaaaagcgtagagtgccctctctgacaacgcatgtgatccagtaggcagtgtctgtttttctcgtaagtgttttcatcactataaaaagtgatttaaaatggaaagggatattggaggcaatcctctggtttcacacttccttttcaggcaaacagggccctccttagagttatctgttcaccagaacaacccaaaagcacatgttccttttttcctgtcatgttgtagctcatttgggggaaaagaaggccaacttaaaacagtcccaggggaggattgcttgagcccaggagtctgaggtttgcagtgagctatgattgtgccactgcactccagcctgtctccaaaacaaaacaaaacaaaacaaaagccgtcccagaggaagtcctgctgcagaaaagatgatagaattggtcacccaatcaatagctgtgaagacttccttattcctgctgaacttccttccttggatatcttcatggataagcctgtgtctgtggacagagtggggcccaagtgctgaggctcgaaagacaggttttacaatcagccaattaaacatcttaccagttgctgtaccccttgccaaggggatgagctgaggagcttcttttctttaggtccaacatcaaaatgagtccatctgagctagggctttttgcaaaggtgattaaaaatcaaggctggagttccagccaaatagggaggagaggtaccacaagttcatcttaaacttgcttccgggctgggtagttaaaacaggaagatcccaaggggatcttacgaggcaaatatcagcaggtaactgtggaagaaaggaaatctcaggacctaatgagttcgttgtaaaatattcctgggaatagatgggggatctactcccagttttttactttttacagaatattgttgctttcctacaacaatgtacatatatttgcagttgtatatgctttttttttttccaaataaacttgtcaccctgcatgcccttggcaaataagtgaagcagaaataggaacacagtccacattcaagttgaggaacagtgtatctttaagagctgagctttgggtgacctggaaagggggaaagatggctaagcatggagagaaacgaggcaagagacaagctatgatacaacaccgcttcagcccctgccctcaatagcacacaacccacatatcagctttctgaagagaaggaacctactgtttagtgctcctcactttgcaatgtttgtgctacgccagaatttctccagtttttttcattatcatccccctgagaaaaaaattacattgaatttaaattttccctaataagagaaattaaatatgaaagaataggattttgttgggtaagattgagctttggaaggtcacgaaccattattctatctaaggtgtgtgttttgttttgtttttttttgttttttttttgcaatccctctccccctgaaccaatttcacattgggaatgcaggacctagactgctgaataaaaagctacttcttctataattgtcaggttctctccaatttctcagcttcctcaaagacatggggtggagttgggtgtgccatcactgagagagctctggaacttttgactcttagtgacatttttagatttaggggttcatggccttccacatgttgccaccaactggtgatctctgccccttcatgctgatcaagaaagtagaaactcctcgtcgccttcaggtttgcagtcgcagaaacattgcctgctgtggactgtcagcacaaaactgggacactggtgtcatttagactgtcagcagtgcacatgattgtacgatagactccaggcaaccatgtgcatctgtgcaagatgacctctgccccaagagaagggttacggtctaattaaatgtttaccaagatggtaccagtgggctctccccgtgtcctttggtgttattggagctggtgtatgacagactcaaggaaattttttaaggaaaatgaagaagaaatcaacctttatggttctctttcattggaagaggagaataaggaaagaaatggcaggtagagagggagggggaaaggaatagaaatggcatgtctttgatgctgtggcttgtgtggggacaatgggaagagcacagcaggcacaacatatctgtgttagtgccacgtggtatctgttaagtatggccagagcctcacatataagtgaagagagttaagacaattcttgctctttgaacaataatagtctatagaatttctattggcaaaccatcccagacaacctgacctatcaaacaaaagcaaataatccctgtctcagaactgctggtctaaaagctagaaggggcatgataatggaaattgctagaaaagagagaatgctctactctctttcctgtgcctacctacccccatcctaaaccctgtaaaacagaatttcaaaatagatgtcaaatatgaagtaattcagacttccaaagaaggaaagagttctgcccagggcagtatgagcaaatccacagggatgttaagatttggtccaactcaaaggtttatgggcagtgagcctagagtctcttgagagtaaacccttgcatttgggacaaggagaatatgtgaagttcaggagtgctcacactagagcaagatccagaaaaaaaaaaatccaatggcattttaaactagattgcattatcactcaatgctgttactttgagcagacaaatcagttgaatgggagggcaaatggcagaaatgaacaaaagctattaggtgaaagcatccccaatgtatcagttgtgagatgatttttgtttaatgatgatcaggtttacattgaagtggcttggaagacgtatttcagagggactgggtttgtactgcaaaactctgaacactagagcaggttctactagcacttgggcagtaaggtagcgggtgtgtattatgctattgccatagttctcgtctttgtggattcacataccctttcccatgaggagcttgctactaacagcctcctgtttctgttgtttttatatgggagaagagaaagagcttggaatttcaattgtctaaacaattggtatgatttacaagaaggcaaaccattcaggagatgttcaacagtgtatcattcttagcattcaatacaatgtttattataaaatatacacctgagtttatgtttttctgccaggctgaagggcaataatgtcttgctatgcaaacactctattttatgtgtgaatttttttaactgtaattttatgtgtgaatttttttaactaaactctatcatcattttctatgttgacatcttttttttttttttaatctgtttccaactctgagtctgtgaactatctcttctgactggatgctggcctaaaatcctattagtgcttaaacagacctcaaaacactctgaacctgtaggccaatacagagatgttgttctttgatatatcttgggtccttgatggcttcaacaaacaaggtcataatttgtttaaattcagtgttttctgtagataccttcttctcagtttcattaagaagagtaaccatctttggttttccaaagaatggaaactcctaccctagactttagacttagagcgtctgcctttcacgatgagtaagagatccagaatgtttaggggatgtgcgtcagcccacctggtacagtggcaaagctgaatgcgaacttgaggcctcctgaggcctgaccttctatgcccccagccctccaccccaagcaccttttggtgtggctggaaacacatgacattggatgtgatttttctcaagcccttcactgtggaaggcatgggagactgcccagcattgggcatgtggctgttaacgtttccatttcaagtccctgattcttactggagaagttaaggagccacttaatgttttcacagacctctgattctgttgtgaatgtggcattccagtgagtacaacctgcttgctataaagaaagcagcatattttgacaattttatttcttccttgggtacttacatttttattacaaaaatggccgttataaaaaaagacagaagggctgggcagtggcttgctccctagaaactgagattccgaagcaggtgtttcctctcccctagactcagaggtacatttaatccatcttctccatttcctccttcaggaccagctatgagattcagtgcatttctagcccagcggatgttcattctccactaaacttcatcttttactaagcaaagggggattattccatgaggcagccaggagcaaggggccatgatattcatgactttgtctgctgggcatttttcaaagtgtccttgaattcactcagcaaacaaagctttctggagaatctctcaaaacttaggccctgctccatttggccaaaaatgatggctgctccaaaactctgaacttcttaaaactccatctgctacattatttctggagtttaaacatgactttttctgtctttgagtatagatgtgtttgtttaattaacgaagcacaagtctgttaagcagaaggctccaagctgtattctatacttgggaatccttggtgccatctttattctaccaagtgccaatcaccatggctaaagtgggcgtatattacagcctgtgtcctaagcttagaagctttaatgtacttttttaaatgaaaagtattagagggggttgaacattgtaactaaagcataaagttagaccaattacatgcagagatgtttatttaatattgtgtgagctgagtccttctgtataaattatttgcacacttttcttgcatgatgaactgattttttatagttgtttgtaccagacggtggcatatttttgtaaaaaacttttgacactgaattgcaataaatgtttttccaacaaca

SEQ ID NO: 656 - DNA, 6435 bp, synthetic construct
  misc_feature 1..6435: note = Synthetic
  source 1..6435: mol_type = other DNA
gggtacaggaaagaagccagtgccccaggtcacctaagacaggcatcaagctcattcggcaaaatccagttgggttgttctaactggctcattcttacttgggtgacctctgcatggcaggagtaacttctgtgcctttgttttcatgttcagcgccatggatattgcaccctgggggaagctttcaacagactggacttctcaactgccattctggattccagaagatttaactacgtggtccggctgttggagctgatagcaaagtcacagctcacatccctgagtggcatcgcccaaaagaacttcatgaatattttggaaaaagtggtactgaaagtccttgaagaccagcaaaacattagactaataagggaactactccagaccctctacacatccttatgtacactggtccaaagagtcggcaagtctgtgctggtcgggaacattaacatgtgggtgtatcggatggagacgattctccactggcagcagcagctgaacaacattcagatcaccaggcctgccttcaaaggcctcaccttcactgacctgcctttgtgcctacaactgaacatcatgcagaggctgagcgacgggcgggacctggtcagcctgggccaggctgcccccgacctgcacgtgctcagcgaagaccggctgctgtggaagaaactctgccagtaccacttctccgagcggcagatccgcaaacgattaattctgtcagacaaagggcagctggattggaagaagatgtatttcaaacttgtccgatgttacccaaggaaagagcagtatggagatacccttcagctctgcaaacactgtcacatcctttcctggaagggcactgaccatccgtgcactgccaataacccagagagctgctccgtttcactttcaccccaggactttatcaacttgttcaagttctgaatcccagcacatgacaacacttcagaagggtccccctgctgactggagagctgggaatatggcatttggacacttcatttgtaaatagtgtacattttaaacattggctcgaaacttcagagataagtcatggagaggacattggaggggagaaatgcagttgctgactgggaatttaagaatgtgaacttctcactagaattggtatggaaaagcaaaatactgtaaataaactttttttctaacaatttgccagcaagactataagggcaataattctatttcagcggtgaaaatggagtcctcttaatggtcacagaaactctcttatagttccctaggaagaaaaaggcaaaactcaaatacaaaataggacgctttgtttacaatgtgaaaatttgtttagaaaagaaaaaatgaagaaggaaaactatataggagaaattcctgggctttggggtttgatctggtgtttgttttgagaaggcgaaggaagcgccacccatcctaaacctgcatgggcacagagccttaccctacagagataccacacaatggtctacctctaaaagcgtagagtgccctctctgacaacgcatgtgatccagtaggcagtgtctgtttttctcgtaagtgttttcatcactataaaaagtgatttaaaatggaaagggatattggaggcaatcctctggtttcacacttccttttcaggcaaacagggccctccttagagttatctgttcaccagaacaacccaaaagcacatgttccttttttcctgtcatgttgtagctcatttgggggaaaagaaggccaacttaaaacagtcccaggggaggattgcttgagcccaggagtctgaggtttgcagtgagctatgattgtgccactgcactccagcctgtctccaaaacaaaacaaaacaaaacaaaagccgtcccagaggaagtcctgctgcagaaaagatgatagaattggtcacccaatcaatagctgtgaagacttccttattcctgctgaacttccttccttggatatcttcatggataagcctgtgtctgtggacagagtggggcccaagtgctgaggctcgaaagacaggttttacaatcagccaattaaacatcttaccagttgctgtaccccttgccaaggggatgagctgaggagcttcttttctttaggtccaacatcaaaatgagtccatctgagctagggctttttgcaaaggtgattaaaaatcaaggctggagttccagccaaatagggaggagaggtaccacaagttcatcttaaacttgcttccgggctgggtagttaaaacaggaagatcccaaggggatcttacgaggcaaatatcagcaggtaactgtggaagaaaggaaatctcaggacctaatgagttcgttgtaaaatattcctgggaatagatgggggatctactcccagttttttactttttacagaatattgttgctttcctacaacaatgtacatatatttgcagttgtatatgctttttttttttccaaataaacttgtcaccctgcatgcccttggcaaataagtgaagcagaaataggaacacagtccacattcaagttgaggaacagtgtatctttaagagctgagctttgggtgacctggaaagggggaaagatggctaagcatggagagaaacgaggcaagagacaagctatgatacaacaccgcttcagcccctgccctcaatagcacacaacccacatatcagctttctgaagagaaggaacctactgtttagtgctcctcactttgcaatgtttgtgctacgccagaatttctccagtttttttcattatcatccccctgagaaaaaaattacattgaatttaaattttccctaataagagaaattaaatatgaaagaataggattttgttgggtaagattgagctttggaaggtcacgaaccattattctatctaaggtgtgtgttttgttttgtttttttttgttttttttttgcaatccctctccccctgaaccaatttcacattgggaatgcaggacctagactgctgaataaaaagctacttcttctataattgtcaggttctctccaatttctcagcttcctcaaagacatggggtggagttgggtgtgccatcactgagagagctctggaacttttgactcttagtgacatttttagatttaggggttcatggccttccacatgttgccaccaactggtgatctctgccccttcatgctgatcaagaaagtagaaactcctcgtcgccttcaggtttgcagtcgcagaaacattgcctgctgtggactgtcagcacaaaactgggacactggtgtcatttagactgtcagcagtgcacatgattgtacgatagactccaggcaaccatgtgcatctgtgcaagatgacctctgccccaagagaagggttacggtctaattaaatgtttaccaagatggtaccagtgggctctccccgtgtcctttggtgttattggagctggtgtatgacagactcaaggaaattttttaaggaaaatgaagaagaaatcaacctttatggttctctttcattggaagaggagaataaggaaagaaatggcaggtagagagggagggggaaaggaatagaaatggcatgtctttgatgctgtggcttgtgtggggacaatgggaagagcacagcaggcacaacatatctgtgttagtgccacgtggtatctgttaagtatggccagagcctcacatataagtgaagagagttaagacaattcttgctctttgaacaataatagtctatagaatttctattggcaaaccatcccagacaacctgacctatcaaacaaaagcaaataatccctgtctcagaactgctggtctaaaagctagaaggggcatgataatggaaattgctagaaaagagagaatgctctactctctttcctgtgcctacctacccccatcctaaaccctgtaaaacagaatttcaaaatagatgtcaaatatgaagtaattcagacttccaaagaaggaaagagttctgcccagggcagtatgagcaaatccacagggatgttaagatttggtccaactcaaaggtttatgggcagtgagcctagagtctcttgagagtaaacccttgcatttgggacaaggagaatatgtgaagttcaggagtgctcacactagagcaagatccagaaaaaaaaaaatccaatggcattttaaactagattgcattatcactcaatgctgttactttgagcagacaaatcagttgaatgggagggcaaatggcagaaatgaacaaaagctattaggtgaaagcatccccaatgtatcagttgtgagatgatttttgtttaatgatgatcaggtttacattgaagtggcttggaagacgtatttcagagggactgggtttgtactgcaaaactctgaacactagagcaggttctactagcacttgggcagtaaggtagcgggtgtgtattatgctattgccatagttctcgtctttgtggattcacataccctttcccatgaggagcttgctactaacagcctcctgtttctgttgtttttatatgggagaagagaaagagcttggaatttcaattgtctaaacaattggtatgatttacaagaaggcaaaccattcaggagatgttcaacagtgtatcattcttagcattcaatacaatgtttattataaaatatacacctgagtttatgtttttctgccaggctgaagggcaataatgtcttgctatgcaaacactctattttatgtgtgaatttttttaactgtaattttatgtgtgaatttttttaactaaactctatcatcattttctatgttgacatcttttttttttttttaatctgtttccaactctgagtctgtgaactatctcttctgactggatgctggcctaaaatcctattagtgcttaaacagacctcaaaacactctgaacctgtaggccaatacagagatgttgttctttgatatatcttgggtccttgatggcttcaacaaacaaggtcataatttgtttaaattcagtgttttctgtagataccttcttctcagtttcattaagaagagtaaccatctttggttttccaaagaatggaaactcctaccctagactttagacttagagcgtctgcctttcacgatgagtaagagatccagaatgtttaggggatgtgcgtcagcccacctggtacagtggcaaagctgaatgcgaacttgaggcctcctgaggcctgaccttctatgcccccagccctccaccccaagcaccttttggtgtggctggaaacacatgacattggatgtgatttttctcaagcccttcactgtggaaggcatgggagactgcccagcattgggcatgtggctgttaacgtttccatttcaagtccctgattcttactggagaagttaaggagccacttaatgttttcacagacctctgattctgttgtgaatgtggcattccagtgagtacaacctgcttgctataaagaaagcagcatattttgacaattttatttcttccttgggtacttacatttttattacaaaaatggccgttataaaaaaagacagaagggctgggcagtggcttgctccctagaaactgagattccgaagcaggtgtttcctctcccctagactcagaggtacatttaatccatcttctccatttcctccttcaggaccagctatgagattcagtgcatttctagcccagcggatgttcattctccactaaacttcatcttttactaagcaaagggggattattccatgaggcagccaggagcaaggggccatgatattcatgactttgtctgctgggcatttttcaaagtgtccttgaattcactcagcaaacaaagctttctggagaatctctcaaaacttaggccctgctccatttggccaaaaatgatggctgctccaaaactctgaacttcttaaaactccatctgctacattatttctggagtttaaacatgactttttctgtctttgagtatagatgtgtttgtttaattaacgaagcacaagtctgttaagcagaaggctccaagctgtattctatacttgggaatccttggtgccatctttattctaccaagtgccaatcaccatggctaaagtgggcgtatattacagcctgtgtcctaagcttagaagctttaatgtacttttttaaatgaaaagtattagagggggttgaacattgtaactaaagcataaagttagaccaattacatgcagagatgtttatttaatattgtgtgagctgagtccttctgtataaattatttgcacacttttcttgcatgatgaactgattttttatagttgtttgtaccagacggtggcatatttttgtaaaaaacttttgacactgaattgcaataaatgtttttccaacaacacaaaaaaaa

SEQ ID NO: 657 - DNA, 6837 bp, synthetic construct
  misc_feature 1..6837: note = Synthetic
  source 1..6837: mol_type = other DNA
ggctcttccggcaacaaagagcagcggccggcagcgggcataaatactgcggcagcgactgccgcgcagcactcccggagcctgcagcgcctgagaccaccccccccgtcccccgagcccgccgcccggcagggtgccccgcgccgttcccgccgcccccacgcctgttcccggccgtcgtccccgtcgcgggcccctgcaccccgagcatccgccccgggtggcgcgtccccgaggccaccaggccggcctcttctccccatccgtcccgtccgctcgcggtgccatgccattcctcgggcaggactggcggtcccctgggcagagctgggtgaagacggccgacggctggaagcgcttcctggatgagaagagcggcagcttcgtgagcgacctcagcagttactgcaacaaggaggtatacaataaggagaatcttttcaacagcctgaactatgatgttgcagccaagaagagaaagaaggacatgctgaatagcaaaaccaaaactcagtatttccaccaagaaaaatggatctatgttcacaaaggaagtactaaagagcgccatggatattgcactctgggggaagctttcaacagactggacttctcaactgccattttggattccagaagatttaactacgtggtccggctgttggagctgatagcaaagtcacagctcacatccctgagtggcatcgcccagaagaacttcatgaatattttggaaaaagtggtactgaaagtccttgaagaccagcaaaacattagactaataagggaactactccagaccctctacacgtccttatgtacactggtccaaagagtcggcaagtccgtgctggttggcaacattaacatgtgggtgtatcggatggagacgattctccactggcagcagcagctgaacaacattcagatcaccaggcctgccttcaaaggcctcaccttcacggacctgcctttgtgcctacaactgaacatcatgcagaggctgagcgacgggcgggacctggtcagcctgggccaggcggcccccgacctgcacgtgctcagcgaagaccggctgctgtggaagaaactctgccagtaccacttctctgagcggcagatccgcaaacgattaattctgtcagacaaagggcagctggattggaagaagatgtatttcaaacttgtccgatgttacccaaggaaagagcagtatggagatacccttcagctctgcaaacactgtcacatcctttcctggaagggcactgaccatccgtgcactgccaataacccagagagctgctccgtttcactttcaccccaggactttatcaacttgttcaagttctgaatcccagcacatgccaacacttcagaagggtccccctgctgactggagagctgggaatatggcatttggacacttcatttgtaaatagtgtacattttaaacattggcctggaacttcagagataagtcacggagaggacttggaggggagaaatgcagttgctgactgggaatttaagaatgtgaacttctcactagaattggtatggaaaagcaaaatactgtaaataaactttttttctaacaatttgccagcaagactataagggcaataattctgtttcagcggtgaaaatggaatcctcttaatggtcacagaaactcccttatagttccctaggaagaaaaaggcaaaactcaaatacaaaataggacgctttgtttacaatgtgaaaatgtgtttagaaaagaaaaaagaagaaggaaagctacataggagaaatccctgggctttggggtttgatctggtgtttgttttgagaaggcgaaggaagcgccacccatcctaaacctgcatgggcacagagccttaccctacagagataccacacaatggtctacctctcaaagtgtagagtgccctctctgacgacgcatgtgatccagtaggcagtgtctgtttttcttgtaagtgttctcatcactataaaaagtgatttaaaatggaaagggatattggaggcaaccctcatctggttccacacttccttttcaggcaaacagggccctccttggagttatctgtttaccagaacaacccaaaagcacacgttccttttttcctgtcatgttgtagctcatttgggggaagagaaggccaacttaaaacagtcccaggggaggattgcttgagcccaggagttcgaggtttgcagtgagctatgatcgtgccactgcactccagcctgtctccaaaacaaaagccatcccagaggaagtcctgctgcagaaaagatgatagaattagtcacccaactgatagctgtgaagactttcttattcctgcttaactttcttccttggatatcttcatggataagcctgtgtctgtggacagagtggggcccaagtgctgaggctcggaagacaggttttacaatcagccagttaaacatcttaccagttgccgttccccttgccagggggatgagctgaggagcttcttttctttaggtccaacatcaaaatgagtccatctgagctaaggctttttgcaaaggtgattaaaaatcaaggctggagttccagccaaatagggaggagaggtaccacaagttcatcttaaacttgcttccaggctggatagttaaaaccggaagatcccaaggggattttgcgaggcaaatatcagcaggtaactgtggaagaaaggaaatctcaggacctagtgagttcattgtaaaatattcttgggagtagatgggggatctactcccagttttttactttccacagaatgttgttgctttcctacaacaatgtacatatatttgcagttgtatatgcttttcttttttttttttttttcccaaataaagttgtcaccctgcatgcccttggcaaataagtgaagcagaaataggaacatgatccacatgcaagttgaggaacagtttatctttaagaactgacctttggggtgacctggaaagggggaaagatggctaagcacggagagaaatgaggcaagagacaagctatgatacaacacctcttcaacccctgccctcaatagcacacaacccatgtatcagctttctgaagagaaggaacttactattcagtgctcctcactttgcaatgtttctgctacgccaggatttctccaatttttttttcattatcatccccccaaggagaaaaaaattacattgaatttagattttccctaataaggaaaattaaatatgaaagagtaggattttgttgggtaagattgagctttggaagatcacgaaccattatactatctaaggtgtgttttctttttttttttttttttttttttgcagtccctctcccccctgaatcaatttcacattgggaatgcggaacctagactgttgaataaaaagctacttcttccataattatcaggttctctccaatttctcagcctcctcaaagacgtggggtggagttgggtgtgccaccactgagagagctctggaacctttgactctcggtgacatttttagatttaggggttcgtggccttccacatgttgccaccaacttgcgatctctgccccttcatgctgatcaagaaaatagaaactccttgtcgccttcaggtttgcaatcccagaaacattgcctgctgtggactgtcagcacaaaactgggaactggtctcatttagactgtcagcagtgcacgtgattgtacgatagaccccaggcaaccacgtgcatctggcaagatgacccctgccccaagagaagggttacagtcttcttaaatgtttaccaagatggtgctggtgggctctccccatgtcctttggtgttactggagttggtgtatgacagagtcaaggaaatgttttaaggaaaatgaagaataaatcaacctttatggttctctttcattggaagaggagaataaagaaggaaatggcaggtagagagggagggggaaaggaatagaaatggcatgtctttgatgttgtggcttgtgtggggatgatgggaagagcacagcaggcacagcgtatctgtgctagtgccacgtggtatctgttaagtatggccagagcctcacatataagtgaagagagttaagacaattattgctctttgaacaataatagtctatagaatttctattggcaaactgtcccagacaatctgacctatcaaacaaaagcaaataatccctgtctcagaactgctggtctaaaagccagaaggggcacgacgatggaaattgctagaaaagagagaatgctctactctctttcctgggcctacctacccccatcctaaaccctgtaaaacagaatttcaaaatagatgtcaaatatgaagtaactcagacttccaaagaaggaaggagttctgcccagggcagtatgagcaaatccacagggatgttaagatttggtccaactcaaaggtttatgggcagtgagcctagagtctcttgagagtaagcccttgcatttgggacaaggagaatatgtgaagctcaggagtgctcacactagagcaagatctggaaaaaaaacaatccaatggcattttaaactagattgcattatcactcaatgctgttactttgagcagacaaatcagttgaatgggagggcaaatggcagaaatgaacaaaagctgttaggtgaaagcatccccaatgtatcagttgtgagatgatttttgtttaatgatgatcaggtttacattgaagtggcttggaagatgtatttcagagggactgggtttgcactgcaaatctgaacactagagcaggttccactagcacttgggcagtaaggtagtgggtgtgtataatgctgttgccacagttctcatctttgtggattcacataccctttcccatgaagagcttgctactaacagaggctccttgtttctgttgtttttatacgggagaagagaaagaccttggaatttcaattgtctaaacaagtggtatgatttactaggaagcaaactattcaagagatgttcaacagtatatcattcttagcattcaatacaatgtttatgataaaatatacacctgagtttatgtttttctgccaggctgaaaggcaataatgtcttgctatgcaaacactattttatgtgtggattttttaactgcaattttatgtgtgaattttttttaactaaactctatcatcattttctatgttgacatctttttttttttttttaatctgtttccaactctgagtctgtgaactgtctcttctgactggatgctggcctaaaatcctattagtgcttaaacagacctcgaaacactctgatcctctaggccaatacagagatgttgttatttgatatatcttgggtccttgatggcttcaacaaacaaggtcataatttgtttaaattcagtgttttctgtagatactttcttctcagtttcattaaggagagtaaccatctttggttttccaaagaatggaaactcctaccccagacttcagacttagagcttctgcctttcacgatcacgatgaggaagagatccagaatgtttaggggacgtgcgtcagcccacctggtactcagtggcagagctgaatgccaacttgaggcctcctgaggcctgaccttgtgtgcccccagccctccaccccaagcaccttttggtgtggctggagacacatgacgttggatgtgatttttctcaagcccttcactgtggaaggcatgggagactgcccagcactgggcatctggctgttaacgtttccatttcaagtccctgattcttactggagaagttaaggagccacttaatgtttttacagacctctgattctgttgtgaatgtggcattccagtgagtacaacctgcttgctataaagaaagcagcatattttgacaactttattttttccttgggtacttacatttttattacaaaaacggcccttataaaaaaaagggctgggcagtgacttacttcctagaaactgagattccaaagcaggtgtttcctctccgctagactcagaggtacatttaatccatcttctccatttcctccttcaggaccagctatgagattcagtgcatttctgtcccagcggatgttcattctccgctaaacttcatcttttactaagcaaagggggattattccatgaggcagccaggagcaaggggccatgatattcatgactttgtctgctgagcatttttcaaagtgtccttgaattcactcagcaaacaaagctttctggagaatctctcaaaacaggccctgctccatttggccaaaaacgatggctgctccaaaactctgaacttcttgaaactccatctgctacattatttctggagtttaaacacgactttttctgtctttgagtatagatgtgtttgtttaattaacgaagcacaaatctgttaagcagaaggctccaagctgtattctatacttgggaacccttggtgccatctttattttaccaagtgccaatcaccatggctaaagtgggtgtatattacagcctgtgtcctaagcttagacgctttaatgtacttttttaaatgaaaaatattagagggggttgaacattgtaactaaagcataaagctagaccaattacatgcagagatgtttatttaatattgtgtgagctgagtccatctgtataaattatttgcacacttttcttgcatgatgaactgatttttttatagttgtttgtaccagacggtggcatatttttgtaaaaaacttttgacactgaattgcaataaatgtttttccaacaaca

SEQ ID NO: 658 - DNA, 1053 bp, synthetic construct
  misc_feature 1..1053: note = Synthetic
  source 1..1053: mol_type = other DNA
atgccgttccttggtcaggactggcggtccccgggccagagctgggtgaagacggcggacggctggaagcgcttcttggatgagaaaagcggcaccttcgtgagcgacctcagcagttactgcaacaaggagaatctgttcaacagcctgaactacgatgttgcagccaagaagagaaagaaagacatacagaacagcaaaaccaaaactcagtatttccatcaggagaagtggatctatgttcacaaagggagtactaaggagcgccatggatactgcactttgggggaagctttcaacagactggacttctcgactgccatcctggattccagaagattcaactacgtagtaaggctgttggagctgatagcaaagtcacagctcacatccctgagtggcatcgcccaaaagaacttcatgaacattttggaaaaagtagtactgaaagttcttgaagaccagcaaaacataagactcatacgggaacttctccagaccctctacacatccttatgcacgctggtccagagagtcggcaagtccgtgctggtgggcaacatcaacatgtgggtgtatcgaatggagaccactctacactggcaacagcagctgaacagcatccagatcagcaggccggccttcaaaggtctcacgatcaccgacctgcctgtgtgcttacaactgaacatcatgcagaggctgagcgatgggcgggacctggtcagcctgggccaggcagccccagacctgcatgtgctcagtgaagaccggctactgtggaagagactctgccagtaccacttctcagagcggcagatccgcaagcgattgatcttgtctgacaaagggcagctggattggaagaagatgtactttaagcttgtgcgatgttacccaagaagagaacagtatggggtcaccctgcagctttgcaaacactgccacattctctcctggaagggcactgaccatccatgcacggccaacaacccagagagctgctccgtctcactttcaccccaagactttattaacttgttcaagttctga

SEQ ID NO: 659 - DNA, 32306 bp, Macaca fascicularis
  source 1..32306: mol_type = genomic DNA
agaggatttgcagagcccggagtcgtcggaggtgtgcgcgctccggagcgcaccactgctgctgctccccacaggggtggccgggccctggaaccgcgaggccacgccacgccggggctcggccaccctccagctgcagcgggcgctcagggcccgcggccccagggacggtctgcagcggcaggtcccggcctggggctgcgcgcgcccggccgcggcctcccctccccctacccgcccctcttccgacctaccgagctgcgggctggggtgcggggctcgctggggtggaacgcccggtgcatcttccgcgcgggtctcgggtgcttgcggggcgctgtgctctttggcgggcccgccgggaggtgcggcccgaccaaagaggcctggcgtccgccccgccgggagggagactgcagcttttgttcgagtcactgagccatgtttgcgggcagtgcagttaccgagacggcggcggcggcggcaacgcggggctgggtgcgatcatctgggaggacgccgtcccctgccccgccggcgcggtggtatctcccttaaagaagccggcgcctcattgttccccggccgcggccgcagggagccagggccacctcggcgtggggagtgaggggacggcggcgcctgcacctggctgcggtgctcgtggcgccccccggaggctcctggtggagggttggcctgcagtcggcgcgcaggagaagcctcggtatgagccaggatccaccgcgctccggccgctctcggggcgggacagtcaatgggggcccagccgctgccgcagtcgctcggctgccacacgctgtcagtcagatccctcacgctgtcggccccacagccagcccggggtcactcaggcccgcatctctcagtcatccagttgttagatcagtaagcatctgccagaaacgtccattccttcttccccgattttttctgcacccattacttacttctcagcagggtgatgattcctcctccttatatagcgctcgttctataaggcacgatgtacgaagaatccctgtcgctgtgctcaaagatcaacccattttattttctgccctccatttattccccttctcccgagagtctggcactgggttaggtctttatataaatgatcttgcttaatcctaaccagaccccacaaggcgaggttttattatcctgtttttacaggtgaggaaacacctgcctcttttcactgaagtgtctattttgggatgtgtctaccttgaatacccactcctagtgtaacaccccctccccttaaaaaaaaaacaaactaaaaaacccataacgattctgtaatctgttaagatttttgtcctgagtgccatccaagtgtcaagtcttcagctgtttgctgaaaacactggtgtcagccaagacttatttcgtgccctcaaaagtagagggaatatatagaaggctctgcgaagacagctaactacctatgtgggttattgatccgaatcaggggagggacctctctctctcaatcaaagtagcgttttcattttgtctcaatcattaagtatcataggaacccttgctctcaagttggctgcagatgagatttgaaatccactctcacccccaatttaggctcacagttaagtctgtgaggtgggtttagatcttgtggggcctgaagcttaaataatttggggtgtcctcctgagaagaaaggttataaaatggccctgggaacacatacctggaacattggaaagggtccctataagtaaaggactctgaagcttaagattcattagcttcagggtaaatgctccctgtgcttattatgttatgtaatttttttttttttttttttttttttttttgcctgtaggcctcctggaggactgagaattcctgggggcaggaaccttgtctgtgattgatctctgcagcctcctcaatctgatacggtatcaaaatacacctaaggctagcattctcatggctggtgggaaggcaaagtgatactgttaacaaggaaatttggcaatatatagccatattatttgatccagtagccctagatcaaatactagatttcgaggaatctaacctagtaatatactggcaaacacacacacacaaaaccaacaaacctgtatgtacagggctattcattatggcattaatgaatagcaaaagattggaaactgctcacatgtctaatgataaagaactggttgaataaattatagtacatacacaggatgaagtactatgcagccatgaaaaagtatgtggaagaggcctggcgtggctcgcacctgtaatcctagcactttgggaggccgaggtgggcagatcacttgaggtcaggagttcgagaccagcctggccaacatggtgaaaccctgtctctactcaaaatacaaaaattaggcgggcatggtggcactggcctatagtcccagctacttgggaggctgaagcaggagaatctcttgaacctgggaggtggaggttgcagggagccaaggtcacgccactgcactccagcttgggtgacagagcaagactgtctcaaaaaaaaaaaacaaaaaacagagcaagactctgtctcaaaaaaaaaacaaaaaacaaaagatgtggaagatttcttatatatactaataaacatatactaatatcaagtgatctctattaagtgaaataagcaaagtgcatacagtgtttatagtatgctattacatgtgagtaatggagagataaatacgcattaagtacttatatttaaaaggtagacaatggaagaataaatcccaaacttctacaaaaatagttgcttatatgggatggagggcatagggatgggaatgagacttctatgaatataccttttatatagtacaattttggaaccttataaacatttcacatgtttataagacagttcaataaaataaagcactccataaaaattaaaaacaaatggaaacaaatgaactatctaatgtcagattggtggtgtaacacagagaaaataatttcaaacggcttcttaagtattttgattttttttttttttaagagttgagttcaggctgggtgaggtggctcacgcctgtaatcccagcactttgggaggactaggcgggcagatcatgaggtcaggagattgagaccatcctggctaacatggtgaaacccgtctctactaaaaatacaaaaaattagccgggcgtggcggcgggcgcctgtagttccagctgctggggaggctgaggcaggagaatggtgtgaacccaggaggcggtgcttgcagtgaagctgagatcccgccactgcactccagcctgggccacagagcgacactctccatctcaaaaaaataaagagatgagttctcattctggcacccaggcttgagtgcagtggtgattatagttcactaacttccaactcctgggctcaagggatcttcccaccttatcctcctgaggagctgggactataggtatagctaattttaaaaattttcttgtagagacagggtctcactgtgttgcccaggctgcttgtaaactcctgacctcaagtgatcttcctttgtctctcaaggtgttgggattacagtcatgagccatcacacccgtccttgattgtacctttctaatggggtatagtctaaggacaaataaaactgcatagaaatatgattgcattcattcgtcttattgctagtagtaatattgatgttgctattttgaaactgatacaagaacagacaaataagtaattatgtcaatagcattaggaaccaagatttttcagtgtatgagaaagtgttttaaggagaaaagaagcttaggataaacttagatctgaattagatagcagtatgtattttttcttttcaaaaatgtattttcagcctggcgtggtggctcacgcctgtaatcccagcactttagggaggctgaggctggtggatcacctgaagtcatgagttccagaccagcctgaccaacgtggcaaaaccccatctctaccaaaaatagaaagattagccaggcatggtggcgggcacctgtagtctcagctactcaggaggctgaggcaggagaattgcttgaacccaggaggtggagattgcagtgagctgagattgcgccactgcactccagcatgggcaacagagcaagactccatctcaaaaaaaaaaaaaaaaagtattttttagctctgtctgccgaaaaggcctaaaagcaatgaccaactcagtgcacagatttcgtctctaaataccatttagaggaaccatgttggccaggctggtcacccagccctggaacacccctagtgcacagatttagtctctaaataccatttaatttaaaaaaattaaaaataatttaaaagtcattgaccaaccttaaaatcactaaaatgttttaaggttagtgtctatttctcaaacaacagtcttggaattgagtcttgttggacttgattggctaggggatagaggattggagatagggtccttgggcccttcctcgacaagctctctgtgtcttgaaggatgggacttactaatggccttaaatccagaggctgtgggggccactaacaaatgtcttgacatataccttccctaaagagtcaactagtgcctggcatgtggtggcactttgttcattaagtcaacagtgctctccacgaaatattcttgctgttaaaaaaaaaaaaatgtctgtgtttagtggctcacacctgtaatcccaaaagtttgggaggccgaggcagtcagattacctgaggtcaggagttcgagaccagcctggccaacatggtgaaaccccatctctaattaaaaaaaaaaaaaattagccaggtgtggtggtgcacacctgtagcccagctactagggaggctgaggcaggaggattgcttgaacctgggaggtagagcttgcagcgagccgagatcttgcctctgcactccagcctgggtgacagagtgagaccctgtctcaaaaaaaagaaaaacaacaacaaaagaaagaaaaagagcataagccttatgaagccaaaatctaattaccagtttaccagaaatatgagggatatacaaagaccataatcagtcaaactccaaatgtggagcattctacaggacaagtgtcctggattctccagtagattcatgatacagaagtaaaactggggccgggcgcggtggctcaagcctgtaatcccagcactttgggagtccgaggcgggcggatcacaaggtcaggagatcgagaccacagtgaaaccccgtctctactaaaaatacaaaaaattagccgggcgcggtggcgggcgcctgtagtcccagctactcaggaggctgaggcaggagaatggcgggaacctgggaggcggagcttgcagtgagccgagatcgcgccactgcactccagcctgggcaacagcgtgagactccgtctcaaaaaaaaaaaaaaaaaaaaaaaaaaaagaagtaaaactggacagtagaatgtgaaagtgacttaccaaatgcagtaaacctcatttggatcgagattcaaatgagttagctgtcaaaagacgtcttcagaaatttaaatataggttaggcactgtggctcacacctgaaatcccaacactttgggaggctgaggcgggcagatcacttgaggccaggggtttgagaccagcctggccgacacagtgaacgacacagtctctaccaaaaaatgcaaaaattagccaggcgtggtggcacacacctgtagtcccagctacttgggaggctgaggcaggagaatcacttgaacccaggaggcagaggttgcagtgagtggagattaggccactgcactccatcctgggctagagacagtgagaccctcaaaaaaaaaagaaaaagaaagaaaagaaaaaataaatttaaatatgaacttagatcaaattaaggaattattgttcttttttgttaagtgacacagtgcttgtgaaagtaagtctttttctttcttcttttttttggagatggagtttcactcttgttgcccaggctggagtgcaatagcgcgatcttggttcaccacaacctctgcctcccggtttcaagtgattctcctgcctcagcctcccaagtggcacggattataggcatgtgccatcgcacttgactaagtttgtcttttcagtagagacagggtttctccacggttgtcaggctggtctcgaattcctgacctcaggtgattcgcccacctcagcctcccaaagtgctcggattacaggtgtgagccaccatgcccggcagaaaataaatctttttcaattggagcagcacatgtgcattagggataaaacaaaatgaggtctggaatatgctttaaaatactccactagcagcagagcaaacaaaaagagaggggaagattggcaaaatgttgatagttgttgaaacttagtgctgggtacatgaggcttattataccattctacttttgtgtatgttggactctttccatattaaaaaagttagacaatcacgctcaaaaaaggaaatgagtattttgaacaaatgggaacttggatgtagcaagcctgccccctggtggcagattccattggtgaagctgatgctccagtctgactaaagcaggtctgaattcccagacctgtcgagatccaagtcctttatcccacaagaaccctacgaagtggagaatatgagcctagtcttttacatctggagaaactgagactcaaagggactcagtaacttaagttcctaataagtcactggtggagccaagactcctggagtctttggactccaggtccccagccccataaatcaatatgaatctgagccttacgtttcctatctgaacagaggtcacatgggaagaggcaaatgggctgtccctacttagaatgggtccaccagaagcagattatcatggagcaattttacctataaactatagataaatacaaatcggtagtataaataaataataggtaatattcatactaccgtttgtgcgaggcactgtgcaaagtactgtttatagagtgatctcatctaatctgcacagcgaccctgtaaagcacgtactattattgtcctcccttttacaactgaggaaacagaggttctaagaggtgaaagtcacactggcacttcaattggggtctaactacaatgtgtgtgtgtgtgtttgagatacagtctcgctctgtcccccaggctggagtgcagtggcacaatcttggcttacggcaacctccgcctcctgggttcaagcgattctctcacctcggccccactaatagctggaattacaggtgcccgagtagctggaatacaggcgcatgccaccccacctggctcatttttgcgttttttttttttttttttttgagacggagtctcgctctgtagcccaggctggagtgcagtggccagatctcagctcactgcaagctccgcctcccgggttcacgccattctccggcctcagcctcccgagtagctgggactacaggcgcccgccacctcgcccggctagtttttttgtatttcttagtagagacggggtttcaccgtgttatccaggatggtctcgatctcctgacctcgtgatccacccgtctcggcctcccaaagtgctgggattacaggcttgagccaccgcgcccggcccatttttgcgttttttagtagagatggggtttcaccatgttggccaggctagtcttgaacccctggcttcaagtgatctgcccgccttggcttcccaaaatgctgggattacaggcatgagacaccattcccggttgtgtgtgtgtgtttgaaaagactttatttttagagaaattttaggttcacagtgaagttgagtggaaattacagagttcccatatataccctgtccccaaggcacatctaggagtcttccttcctaccagattgctgaccctgaatttctcttctggagaaattataagaggcctcattgatgcattgttagagacctagtacccactgagccaaccacaagttgttatcaaaatgccacaataaggtcattaagggcaactggctaggcctgtcagtgaatgttttgggagcagctcctaactgctgtagcagggagaatccccgtcagtgtcccctcccttctccttcccaagcttagggagctccagccccatttctttctttctctctcttttttttttctgagatggagtcttgctctcttgcccaggctgtagtgcagtggcacaatcttggcccactgctacctccgccacctgtgttcaagcaaatcttctgcctcagccttctgcgtagctgggattacaggcatgcgccaccacgcccccacacccggctaatttttgtatttttttttccttttagttttcacatttagtttttttccttttagttttcacatttagttttattgtaacaaagcaacttgtacacttttaacatttgaaactgagcatcatctttccagtgaaacaaaaagaaaatttaaaaattaacaggaacaaaatttacaatagagaatgtcaattccaaataagatcctacaagttctgctgattctcccattgagtggcagggctcaagtcatcattaggagagaatttatttttaaaagtgtcatcttaaactgcaaggatgtctgtcaaatatcacaattaaacatgccaaaggagaagccatgttgtcaaaatgcccacttaacccacccaaacatctcaaacccaccctttgctgaccttctataaccccattttttaaagtttttttttctttttttaaacaagagaaagtagacacatacatgttggtaaatgctaactgtccatattcacatagagacacagtgtactctctgagcccaacatacagagaaaggaggaaacaagctagaattctacgcactgctacacaggggcccagcaccctccagcttccagcagagcgaagggagcagggctttctttcttcccacagagctcggtggtggtgattccatacagtttttgttgagacaggaagggataaaaatgaactttgaacagaaagaggtagagactcttttcccattgtattctgctcaaggtatttccccccaaataagttgagaaccatggagtagagaaaagagacctcaagaacagggcgactgagcacaagaggaaaaaaaaaaaaagactgcaacttgctcccagggactggaaaaaatttaaaaaaacgaaggttggaatccatcagtgttctattagtcatcttctccttcatcctcctctccttcctccccttcatcatcttcatcttcttcaccttcatcctcatccccttcatcagtatcttctaatccttcctcctcttcatcatcatcatcatcatcttctccttcttcatcatccatatcaggaaccaagtagttctgtaatgggtttggccaaatatcatctttgatgacctctcctaactcattagcacctgcatcagaatggtcagtaaaccaggtaaagaagctctctggttcctcatgctgcgtcttcctgctggctttattctgcgtttgacttgaacgtttcgtcaaatcctttccagatttccatttgattttggtggactttgaagatggatcaccactctccttcagatgaaattctttggagagaactttattttcaaagtaaggatttccatcaaaataaaaatctgttctgtaacctgatttaatatcttcaaattctgtcacttcaactctggtcaaataatgcagtgcctcttcgtcttcctccccaagcagtgcagacacttgtggatggttgacaaatgtttttacccaaaaatttgggattttggtgatcaattctgacctcttctgaaaaaatggttggtggtgtttggtatatttctgttctactttcaaaatctcctcactagctcgttcattaagtctgtctatttcattttgtacttccttaatgtgttcaattgcttcttgctgttctttttctcccttcttcagcaagcctgcagaggccaatgtctcctccggtcccagagcaggcggtggtcttggtttcttcttttgaggcaggagtggagactggcatttaggggccatgctgttagggaagtccaagaaccagaccacgagtctcttgcccatctggaagcagattgaacactctaatttttgtatttttgttagcgatggggtttcccatgttggccaggcaggtctcgaactcctgacctcaggtgatccacccgcctcggcctcccaaagtgctgggattataggcatgagccactgcgcccagtctccttagccccatttctgcagggggaggctgagggagaaactcctttagggagggtactagctttggcactaacacgctgtgtgatcttgagcaagaaagactcctccctgctgtgggcctcagtctccccatctgcaaaatgagggggtctgaccagctcatctctaaggatccttccagctccaacactctgattcttcaatcctacacctccactatgcttataataagaaaaccaaaatgtttatttctgatccagcctccgagaaaagtgatctgggggcccacaaaggtcttgtgccaggtataactttggctgtttttgtctttggatgggtcctagttgtcttcttggtgaggactgagaacagctagagcaggtgatggttaagacccaggttcacatctccttctcctgtgtccaagagctgctggggtgccaccatctgaaaaccatgctggatgtgagggttgagagtgtcctaaactgaggattcacccatctcctcagcaggtcctgaggtgttaaagcttgggtttcgtgtgattctctggcctcttctggacgcttcatgttgcaagagcagaaacaaagtgactgaaaggaatgattggtacatatacctaagagaaatggagacgggagggctagcttcgggaaggaagtttgattcagcagctcacatgtcaccaaagacaccagtttcctctgttctgcctcccatgatgctgcattcgtcttaaggctggcttcccttgtgggcctgggggtcaccagtgggaatgcagccttatgagttcacatcctgcaggaatgagaaagtcagcttctctattcctcaaacaagattcctaaaatttaagtcttgttggacctgattggctaggggctagggagtagggagtaggggatagggttgtgggccccttcttgaccaagctctgtgtcctgaaggatggggcttactggcaggcttaaattcagaggctggtgggtggctaacaaatgtcttgacatataccccttctcagaagtcaactagtgcctggcacatggtggcactttgttcattaagtcgacaggtatttggtgaatatctaccacatgcaagaaattgtgcttgatgctaagaaaaagcagtgaacgaaaagataaagtccctgccctcatggacttcctctgggaggagagacagacatataaatatgcagacagtacagttcaactagtgccagctgaggttacacagcccaggggaggaaatccaaactgtgcttctgtggaggggaatggcgggtaggaaagctttagagaggaggtagcatttacactgggccttaaatttagccattccacaatgtattcatatttcaaagtattatgttgtacacatgtgtaatatatacaatttttgtcaatttaaaaataaattgagatttgagggtcagagcgagacactcctttaagctgacattcttcaaatatttgctctatggttatttagagcagcggctgggaaggaggcacagataaccaaccacacttagcttctcgatggtgctgacatcttgggccctggacaaactgtagaccccacaaggcccgctaatccatgtacctgcgaatgttacttaggctggcccctgacctcccggccccaagccttatccacatttgtcgtccaagagtatacagacctctcctggagaggagtgctagtgaatggaatattctccaatgtgtatgggagccaaagtgccaggcaccatgctaggcactggggatgtggccatgaaggaaacatacagcatacacagtgcgtcttcatctgttcatgctgctataacaaaataccttagactgagtaatttataaacaacagaaatttacttctcccaatcctagagactgcaaagaccaagatcaaggtaccagcagattccgtctgtggtgagagctgctctctctgcttccaagatggtggcttggtgctgcatccttacaaggcagaagtgggagggcaaaaagggatgaatagctcctttgcaccccttttaccttttttttttttttttttttgagacggatttgcgctctgttgccaagctggaatgcggtggcatgatctcggctcactgcaacctccgcctcctgggttcaagtgattctcctgcctctgcctcctgagtatctgggactacaggcacatgccatcacacctggctaattttttttttttttttttttttttttttttttttagtagagacggagtttcactatgttgaccaggatagtctccatctcttgacctcgtgatccgcctgcctcggcctcccaaagtgctgggattacaggcatgagccaccgcgcccggcctcttgcaccccttttataaggtcactaatcctacccatgacggctccaccctcatgacttaatcacatcctaaaggccatacctcttaatactatcacactagcagttcagttttaacatgaattttagggggacacatggagaccatagcgcagtgcctgttctcatgaaacttgccttcttatttacacccacaatgatcatggaaagagacacagacacagttctggaaagtgctatgcaggagaagctctagggggcatgagacttattaggaggcagggaggaggtagtatgggccacggaaggcctctgagcatatgacagaggccttttttttttttttttgagacagtcccactgtattgctcaggctggggtgcaatggtgtaatctcagttcactgtaacctctgcctcccgggtcaagcgattctccttcctcagcctcacaggcagcttgggactacaggcacacaccaccacacctggctagatttttgtatttttagtagagacggggtttcgccatgttggacaggctggtcttgaactcctggcctcaagtgatctgcccacctcagcctcccaaagtgctgggataacaggtgtgagccaccatgcccagccacatgtgacacttatgctaagaaatgaccgagaggcagaaatgagctaagtgagcagcggagggaggagcatgcttggcattcaggacgacctgtccagctgctctatgcaggccttagctggaagtttaaatcaagagctggggggagatgatggggagaggaagacactaggaacctccattgtggctataaatacaagcgtttgcttccaaagcccaactttatcagtaataagtcccatatttttatctctccattgctttgatagccatttggatttcctaataggtctagatcccaactggagggggaagaagttataaagtttagccttaaaacccctacacaagcaggggtgagatcctatcgggtctcgtagatcatgttatggatttggggataaaagcaacaggtcagcaagggtctttttttttttttttaattgtggtaaaatagagataacaaaatttgctgatttaatcattttaactgtatagttcaacagcattaagtacatttatattgttgtgcaaccattaccaccatccagaactattattattattattattattatttgagatgaagtcttgttctgtctcccaggctggagggcagtggtgtgatcttggctcactgcaacccccacctcctggttcaagcaatcctcccgcctcagcctcccaagtggctgggactatgtgctactatgtccggctaatttttgtattttcagtagagacagggtctcatcatgttggccaggctggtctcgaactcctgacctcaagtgatccacctgcctcggcctcccagaatactgggattacaggtgtgagccacccagcgaggacattcagggttttttttaatcatcccgaactgcaactctgtatccattaaacaatagttccccattccctctctccccggcccctggtaatgtgataaccactattttacttgtttttttttaagacagagtttcactcttttctcctaggctggagtgaaatggtgcaatctcagctcactgcaacctccacctcccaggttcaagtgactctcctgcttcagcctcccaagtagctgggattatatgtgcctgccaccatgtctggctaattttttgtatttttagtagagacagggttttaccatgttggccagactggtctcaaactcctggtctcaaaccccaggtgatctgcccgcctcggcctcccaaagtgctggaattacaggcgtgagccactgtgcgcggcctctactttctgtatctatgatttgactattctaggtacctcacatgaatggaataattcagtactttttttgtgtgtctggcttatttcacttagtgtaaggtctccaaggttcacccatgttgtagcatgtgtcagaatttccttcctctttaagactgaataacattccgttttatgtatatactgtgttttgttcatctgttaacctgtcaatcaccagagagttttaagtagagattttatttattttatttttattgtttttgaggtagggtcttgctctttgcccaggctatagtacagtgacatgatcgtggttcactgcagccttgacttcctgggctcaagcaattctcccatctcagccttccaagtagctgagaccacaggtgcgtgcaaccacacccagctaattatttgtttgtttatttatgtggagacatagtcttgctatgttgcccaggctggtcttgaactcctggcctcaagtgatcctcctgcctcggcctcccaaagtgttgggattatagttgtgagccaacacattcaactaggtagagactttaaacacactcatatgtccagtttaaaagatcactttagaccaggtgaggtggctcacacctgtaattccagcactttaggaagccaaggtgggcagatcatttgaagtcaagagtttgagaccagcctggtcaacatggtgaaactttgtctctactaaaaatacaaaaattagtcaggtgtggtggcacctgcctgtaatcccagctacttgggaggctgaggcatgagaattgcttgaacccaggagccagagattgcagtgagccaagattgtaccactgcacttcagcctgggcaatagagtgaaactcagtctcaaaaaccaaaagatcactctggctggcagatggagactggatcaagagtgagcaagagggcaaggagagatgagttgcaaaagtttaggcaagagatgatagtggtctggaccaggctgtgaatgaggcgatggaaagaagtcgatttaagggcaggtgggagattgcacaggatctggtgtttgaagtttgggatgggaaggaggaatagccaaggaactgctggacgtagggaaaactcactgctccttatcggctcagagctgagggggtcttttgagctgaagataagggtgcctctctacacatctcagggcttccttctctgctttctgactcagactgagacaccaagatattttctgttgatcatttggcttcccctgtggctttctaacaagggaggacacgccagtcttttgatatacacacattcttgcatacttgactgataaatttatctttgtaaactcacagattgttatctgctttatgattgagtcagagtctgttgcttcattgttgttagcccaagggtgaatcctctcttaatgtaagcaaaaagttagagttttgacattgtaaagttgaggcccaagctccctattatggcaacttcaccaagagagtcttgtggatctttctcatggtgttcagacttctcgtggagacacccttccggaccactgtattatatgctgagtattcaagctcaaacagggatagggaagtagacaattgagttgaggtggacactgtagtgatgctatgcacccatagcttgcccctccagttacattcactgttggtgccacacactctttcaggaaagcagtctgtcagtatttaccaagatgttttcaatattagtcctgcttctgagagtctgtagcctaaggaaatgatttaaaatgtgacattcaatgtagcattattattattattattattattattattatcgagacggagtcctgctttgtcgcccaagctggagcacagcagcgtgatctcagctcgctgcaacctccgcctcccagatttaagcaattctcctgccttagcctcctgaatagctagaattacaggtgcgcactaccatgcccagctcattttttttttctttgtatttttagtagagacggggtttcaccatgttagcgaggctggtctcgaactcccgacctcaggtgattcacctgccttggcctcccaaagtgctgggattacaggtgtgagccattgcacctggtccaaggtaacattattgataatggtgagaaactaaaagcaaaacgtgtccaaaaacatatccataggatagaatattctgcagccgttagaaagtggacattctcaaaagagtggatcttgttcttaaacaggtgaaactaatctatgtcgatagaagccagaaggttacgtgaggggaagaaaggtagttattgactgggaaggtgagggaatcttctggagcactggaaatgttctgtttcttgagatgggtggtggttacatgggtgactacacacatgaacattcactgaacttcacattttatatgtgtgcactctactgtgtgaaattagacctcaatttaaaagaatgagctctaagaccatgtagcaatcaatgcccagtgggaaatgtcaccaagtccttgagagacgggctttgtctgttccgttcctggagaagaagggctttgttctgttggctgctgtatactcagagtttagaacaatgcttggtgcgtagtagaccctcaacaaaaacctactgaattattatagtaaatgcttagaataaaatgttaaatgaaaaaaaagtcccaaagttacacaactctttttatttatttacttttttctttggatgcagaatctcactctgtcacccagactggagtgcagtggtacgatctcggctcaatgcaacctccgcctcatgggttcaagcgattctcctgcctcagcctcccgagtagctgggattacaggcgtgtaccgccacacccagctaacttttgtagtggagagggggttttgtcatgttagccaggctgttctcaaactcctggtttcaagtaatccgcccacctcagcctcccaaagtgctgggattacaggcgtagccactatgcccagccaaagttttacaacttttaagcacatgatggttacaatgttataaaaatgatgaacaggaaaaaatctaaagaaaatagagtgaaatggggttggtggttgtgctgagtggtgtggttataggagactgtattttattttatttatttatttatttatttatttatttattttattttattttattttttgagacggactcttgctctgtcgtccaggctggagtgcagtgacgcgatcttggctcaatgcaacctccgcctccagggttcaagcgattctcctgcctcagcctcccgagtagctgggattacaggcatgtgccactgctcccagctatttttttttgtatttttagtagagacggggtttcactgtgttagccaggatggtctcaatctcctgacttcgtgatccacctgcctcggcctcccatgctgggattacaggcatgaaccaccgcgtctggccatgtatggccttctctccattctattcatgatggatgccttctctccattctattcatgattctgtatgtaacttcatttggaaacagcaactaacgctgagagagtgcttattctgtgccaggcttcacacttacagaaatgtctactttacatttatcaactcactgcatttttgcaaaaatcttatgaagtatttatccctatcttacagacagagaaactgaggcacagagaggttaaggaatctgcctgaggttaggccgcattaaggggcagccctgggagggtggcccagcaggaatctggctccaggggctgcaggcttaagcagtatgcctcactgccactcagaagccaagatcaaaaggctaaatttgcagcctctgtgactgagagtctcgaacaaatgggctgctctgctctcctccccctgtgattttccctttttcctgggagactccaaatatgaagcacctgaaaggggtgaagggaggagcgatggatggagaaccagggaccagaggagaagaggtgggcagatgcggaaaggccccgcctgctccaagcacaacctcaccttccctgggcaggaacagatgttcctgttacccgattcctcactctagaagcctggggagggcccctctcccaggctggccctgcccctggcccctggcccctggggccatcacgaggcctgggccaacagccctgatcctgctgttcatccactggaaaggtggcttcctggaagctcgtcccctccctctgtgtcccatcctagttcactctgttcctggaagttgaagaaaccaggcacagagcttccgttgcacaccagccagccggagcagcgtgcctccctctggctctcaccacccactagaggggagaagacgagggcttggtgctgctggaggataggatttgagtttctctctgcagctcacttgctgtgtggcctagggcaagttcttgacctctcacaagcctcagttgtttcatatctgaaatggagatactaaaagtacctgaaggggtggctgtaggattgaatgcaacaatgtgggtgacgcatttggcacagtggcctggcactgtgcagcactcaaaacagggtaactatggttactattattatcctgccaccctcattctcttcagggtcacggaggggttggagagatggctgagaagttgccttggctccagtaggaaacgcctttcttatcagtgtagatgtcagagtctgtcagagtcgagttactaatacccagccagcccaccagctttgcatttagcattccaagatggagaggtgggaaggggagggctgggaaacaggtggccagggcaggagaaggagccgctggcctcgctcgccatgggagcagtccttcccagcctcagcaggcagtacttggcgccttctctgccagacactctccacctgcactctaaggtctgggaaggtgtgaaattcctgcatgaagtcaaacgccaggctgtcatctcctcagtcccctatgggcacagcactgtccttccagggatccaaagcccaagagagcagcgcttccagaaggaggagatccaggcatggaacagaggactctcaaagctggaagggggcttaaaggacccccatctgccttaggggtttagacacaacccctgccttggactcaggcagacctgtgtgatcgggaaaatctacatccttcagcctcagtttcctcagcggttaactgggaataatactaagtttgagccctttgtttgaaatgtttgttcctcggtgttaaatagtacttggacataaatttaatttatttactaaggccatttttacttcctgccaggaagggtacactcaccagcagttttgccgcaagaggacaccgaacaaaggagacagggtcgtttataacctgacgcgtccaccccactgctgtgtctggtttccgttggctggaacgggacctcacattctgtatctgtcccgattggctagcgacttagaactttttaaaagaggcaaaggtagaggggaacaaaggaaggaggaagtaatttgtagaatgctgaaaaaggttaaaacacttttaaataaggaagaagaacaggctatggcctaatgcttgcttggaccagtataagcatgccagggcaaatattggaagctaagaacataaagtatattgatttctttattacagctcgcagatatttaagaatgttagcacaggtctttgaataaattttgcttctaagagaagttactatttattcctaattagacggggaggaaagtctttgaagaggaacctctactttactttttacaccttccatgtatgaaaggaaaataaaatcttgggacccccaactcactgtgccaaaagggaacgttaagtttggaaactgagtcacacataaacaattgcctttccttctcttcttaaacaggtatctccccagctggcctccctcaccctgaaaatgtaagtgagcagcttatcttgacgggtatgggacaagaggagactagaaatagtctcaccgcccaccccagaggaatgcgtatttgacttctccctctgctgtgtgtttgtcttatgtaaggtgtagatttactgagcacattgagcataagaggaatacataattttttgtttgtttgtttttgagatggagtctcactctgttgcccagactggagtgcagtggtgcgatctcggctcactgcaacctccacctcccagattcaagtgattctcctgcctcagccttccgagtagctgggattacaggcatgcgccaccatgtcccgctaatttttgtattttcagtagagacagggtttcaccatattggccaggctgatcctgaacccctgatctcaggtgatccgcccatcttgcctttccaaagtgctaggattacaggcatgagccactgcaacagccagaatacagactgttcctctaccccctcctttccatgtgcaacgtgtggattcagtgagggctcagcaaagcctcaaaacaatgtaaccacttgtctcagtttttctgtcctccttttttttttttctttcctccttcctctccagctcagccttggcaaaatatacctctaaactgaccaagacctgtcttagacactcttcttggttgacacatgcaatagaaacattttcatttggctgttgaaaggacaaatgaaataattcctaaaagcacggggattagtgtacagcaagtgtctggtaatagtgggtgttgttggtagcccaactcctcatttttacacacaacttcccattttgttcttccccaggggagccgtggcagatcttaagaaacaaagatcttccaggaatttttcattcctccacttgagctaacaaattataccagacaatgcttctttgttttcttaaaacaaaaaaaaattttttaattgatttaaaaaaggtaataccctttattttttacagcagtttttaggttcacagcaaaattgagaggaaggtacagacataccccatagagccctggcccctacacatgcacagcctccccgactatcaacatctcccaccagagcggtaccttggtttttttgtttttctgtttttttgagacagtctcactctgttgcccaggctggagtgcagtggcccaatctcagctcactgccacctccgcctcctgggttcaagcgattctcctgtctcagcctcccaagtagctgggattacagacgcccatcaccatgcccagctaaatgttatatttttaatagagacaaggttttgccacggtggccagggtggtctcaaacttctgaccttaggtgatcagagcagtacctttattacaattgataaacctatgtggacacactgtcaccccaacccggagtttacattagtgttcactcggtgttgtacattctaggagtttggacaaatgtatggtgacatgtatttaccactgtagtaccatatagaataatttcactcatgtaaaaatcctctgtgctctgccaattcatcccttcctccctgcttaccgctgacaaccactaattttgttttttttctttttttgagatagagtctcactcactctgtcacccaggctggagtgcagtggcatgattttggctcactgcaacctctgcctcctgggttcaaacaactctcctgcatcagcctcctgagtagctgggattacaggcgtgcaccatcatgcccggctaatttttgtaagttttagtagagatggggtttcacatgttggccaagctggtcttaaactcctgagctcaagtgatccacctgcctcagcctcccgaagtgctgggattacaggtgtgagctactgcgcctggccaatcactaattttttgattgtctccatagttttaccttttccagaatgtcatatagttggaatcatatagcatgtcagccttttcagatcatcttctttcacttaattatatgcatttaaggttcctctatgtctttccatcacttgttagctcatttctttctttttagtgcagaatactattccactgtcccgatgtactacagtttatttatccattcacctgctgaagaacaccttggttgcttccaagttttggcagttatgaataaagctgctataaacattcatgtgtaagtttttgtgtgaacataagttttcaactcttttgagtaaataccaagcagtgtgatcgctggctagtatggtaagagtatgtttagttttgtaagaaactgtcaaactgtcttccaagtggctgtaccattttgcattcccaccagcaatgaatgagagttcctgttgctccacagccttgctagcatttggtgttgtcagtgttctggattctggccaatctagtaggtgtttcattctagtagtggcatttcgttgttgtgttaatttgcaattccctaatgacacatgatgttgagcatattttcatgtgtttatttgccatttgtttatcttctttggtgaagtgtctgttcagatcttttgtctattttttttttttttttgtcttgttttgttgagacggagtctttttctgttgcccaggttggggtacaatggcgtgatgtcggctcactgcaaactccgcctcccagattcaaacgattctactgtctcagcctcctgagtagctgggattatgggcgcccaccatcacacccagctaattcttttatttttagtagagatggaggagtttcactatgttggccaggctggtctcaaactcctgaccttgtgatcagtccaccttggcctcccagagtgctgggattacaggcgtgagccaccaagtccagccttgtccatgttttaattgagtcatttgttttcttttttttttttttttgagacagagtctcgctctgtcgcccaggcaagagtgcagtggtgcaatctcggttcactgcaagtgctacctcccgggttcatgccgttctcctgcctcagcctcccaagtagctgggactacaggcgcctgccaccacgcccagctaattttttgtatttttggtagagacggggtttcaccatgttagccaggatggtctcgatctcctgacctcatgatctgcccgcctcggcctcctaaagtgctgggatcacaggcctgagccaccgtgcccggcccatttgttttcttcttgttgagtttcaagggttcttggtatatgttgaataatagtccttgtcttttgcaaatattttctcccagtctgttgacttggcttgtcattatactgactgatttttattaatgactcaggatttcttttcctctgttactaaaaaataagtgttctgaccaggcacagtggctcacacctgtagtcccagcactttgggaggccgaggcgggtggatcacttgaggtcaggagttagagaccagcctgggcaacatggtgagacccctgtctctactaaaaataaaaaaattagctgtgtgtggtgttgtgtgcctgtcattccagctacttgggaggctgaggcacgtgaatcccttgaatttgggaggtggatgttgcagtgagccaagattgcaccactgcactgcaggctgggcaacagagtgagactccctctcaaaaataaataaataaataaaaatttaaaaataggtgttcttaaaagtttgtatcatatgaagagcagaaaggcttgactttgccagtgctcttgcctatggaggaccccacatttggcaggtatagcaggtgacatcccgcatgttcaggattgtggcccagagagggagtgtgactcacttgagattgcacagcatgttcactaagctaatatattcttctcacacacatagccttcatagtaatcacagaactcttatttggtttgaatgagactcctggaatgtgtcttctttcttctgtactttaaaaaagttgcaaaaagaaaaatgtaacaacagcagattttttttgaaaaggacaaaaccaaaacacccataatcgtagcacctcaataactgactgtttcacttttctgaggatgttatctatctggcaaaggttgggatgaggtgagcccacatattgtaatagttatcatcttagtgtatcttacgcttttttgttttactttttttttttttttgagatgaagttttgctcttgttgctcaggctggagtgcaatggtgcatctcggctcactgcaacctccacctcccacattcaagtgattctcctgcctcagcctcctgagtagctgggattacagccatccgccaccacacccggctaattttgtatttttagtagagacggggtttctccctgttgttcaggctggtctcaaactcccgacctcaggtgatccgcccacctcggtctcccaaagtgctggggttataggcatgagacatcacccccagccttgttttacttttttccaggtttcaatacaatgtattagaatggctgcataacccttggggctgtctctggagtgtccttccccaaagttgtcactcagtcagctcttccacatcatccaagtctcagatcaactgtctgctcctcaggggtccttccttgaacatcgtatcttaagcatccaaggcaatctctctgattgaaagtctctctccatattactctatatttatatttatatacacacacacacataatatatatatatatatttttgggggggggtttggtacagttggggccttgctatgttgccaagctggtcttgaattcatggactcaagcgatacccccatctcagcctcccaaagcccgtccttccttccttccttccttctttccttccttctttccttctttccttccctcctctctctctttctttctttcttactctctctctctctctttctttttttagaatactttattattgttattttttatagagacaggatctggctatgtcgcacaggctggagtgctgcaaaaccatcatagctcactttagcctcgaactcctgaactcctcctccctcagcttcctgagtagctgggactacaagtgtgtgccaccatgcccagctaagttttaaaatttttgtagagacaggatgtctctatgttgtccaagctggtctctaactcctgggcccaagtgatcctcccacctcggcctcctacagtgctgggattgcaggcatgagccattgctcccagtcaattctggtttcttttgtcttttttttttttttggagagagagagtctcactctgttacccaggttggagtgcagtggcgtgatctcgactcactgcaacctctgccccctgggttcaagggattctcctgaatcagtctcctaagtactacaggcacacaccaccacacccagctaattttttgtatttttagtagagacaggattttgccatgttgcccgggctggtcacgaactcctgacctcaggcaatccgcccacctcggcctcccaaagtgatgggattacaggcatgagccactgtgcccggcctggtttattttcttgatagcatttgttacatcagaaatcatctttatttttaaaaatctgtcttctcctgccagaatataagctccctggggagaaaagggaacttttctctcttgctttctctgtatctccagtgcctagaacagtgcctggcatgtagtaggtgctcaacagatatttattttatcaactcgagaattcagctgactgaccgggctcagtggctcacacctgtaatcccagcactttgggaggccaaggcaggcggatcatctgaggtcaggagtttgagaccagcctggccaacatggtgaaaccccatctctactaaagatacaaaaattagccggatgtagtggtgggtgcctgtaatcccagctacttgggaggctaaggcaggagaattgcttgaacctgggaggtggaggctgcagtgagccgagatcgagccattgcactccagcctgggtgacagagtgagactccgtctcaaaaaaaaaaaaaaaagaacagaattcagcagaccacagtttacctagttggtcattgaatatcctttttaaaaatagcttcttaactgatgctgcaatagatgtcttggggagccagtatatcaaggagttttggaagaaggttttggcaaaagacatgggttcctctgtcacctctgtcatttactaactttgtgatgttgggcagtatatttaacttctctgaatctcagtttccttatttgaaatgagggtaatattagtgcctatctcatagggttattgtgaggtaaataaaaggaaaaaaattaaataaaaataatgcatgtaaagagagtgcttagcaaaatgcccatgaaacaggagcaacccattccagcatgttctctgtgctgggcactgctctaagtatttcccaggtgttgtctcatgtaatcatcagaatcatctttttttgttggttacacaacaatggttattttgtgaacatttattcagctacacacttagtcatgtactttttggtatttggattacagtcagtaaaaggtttacttaacaacaataacaacaacaataaaagctctatgaggaaggaaactttatcattcccattttatagatgaggaaactgaatctcaaagaagttaaatcattggctcaagatacagcacagccaggtgcagtggctcatgcctgtactcccaactacccagaaggctaaggtgggagaattgcttgagcccaggaggcagaggtttgcatgagttgagatcgtgccatttcactccagtttgggtgacagagcaagggaaaaaaaaaaaaaagatcagggctaggcgtggtggctcacgcctgtaatcccagcactttgggaggctgaggcaggtggatcacctgaggtcagaggttcaagaccagcctggccaacatggtgaaaccctgtctctactaaaaatacaaaattagctgggtgtggtggtacaggcctataaataatcccagctacttgggaggctgaagcaacagagtcatttgaacctgggaggtggaggttgcagtgaactgagattgtgccattgcactccaccctgggcaacagagtgagactccgtctcaagcaaacaaacaaaaagatcatacagtaagtgggtggggctgtgggtccacagctgctcactgccagacccatttaagcactcattaaacagtagccttttattattattaacatttaacatttttgttgttttaaaaacttttttctattttaaataatacttcagggtgtatctttggccatttctggcttttctctggttttgaatgacttcctttggatacaatcccgaagatagaattaactggggaaaatagggtccagagagttgatgtgacttactcaaggtaagtagtggtgcttggagcagggccaccacgtacagttgtatagattattcacttcacttgatctgggggtgagtgggcttcccaggggagttcagccttgggcagggtttgaataggcagaggagggggtgttccaagtaggggcccttagaaggggagaacgaggagggtgtgatggagaaatagtgggaaatcagttccaacggagcagacagtcggagacaggattttaggagacaggtgggactggatcattcattcattccataaatatgctaagctgcattgtatgccaggcgctattccaggagctgtagatagcagtgaacaagctcatccaatccctgcactcatggaacagatactgtcttaggcggagggtggggacaaacaactgacacagacattgagtaaaatatagattgtgataaatattgagaaagaaccaagcaggtgctcggtccaggagtagtaggacggggcctgtttaaatagagtggttaaagaaggcttctgtgaagaggtgacatcttagctgaggaggaaaagactattctaggcagatcacatagcaggtgcaaaggcccggaggcaggatgctgcagagatggcgttcaaagtcatgcagaagagagtcttgaggggttgtaagtttagaagtcatttcagacagccttgagcaaaggattctttttccccaaccccattccagctttttctttctctctctttcttttggagactgggtctcactctgttgcccaggctggagtgcagtggcgtgatctcagatcactgcaatccccacctcctgggctcaaccaatcctctcacctcagcccctgcaaagtagctgggaccacaggtgtgcaccaccatgcccggctactttttgcatttttctgtagagacgaggtttctccatgttgcccaggctggtctcaaactcctgaactcaaatgatcctcctgcctcagcctcccaaagggctgagattacagatgtgaaccactgcacccagcccctagtctgatctttgttctgagttcagctgtacttttccatctgcctgctggttgacccacagagcagtcacctcaaagtcatgtgttcttcccaaacagctccccacctcccatctccttctaaatctctacactctcccttgactattgctgagcatcttgagtcttccttcctcattctctcacttctgtctcttccttggccacttttctagaccagggagtcaaccaagtaccatagtgtgataggaccacacacaagcactgtgaaagtactcagacctgggctcaaatcgcagctctgccattcagttcatttcacagggtctcggttcgttggttggtgtagggaagttgtaccttggtggctggagagtaaatgagatgatgttggaggtgacagcagctggcacacagtaggtatctgatgagtgacagtgccttgccctttccctaccaaccttggggaactgtcttgttttcttcatagcttggctttttctatttaggaagcagagaggtggttgaagttcttgggtaatcattgactctcaaaatatctctctggggaaccaagatctccaatatttcttttcaaagtatttaaaacagttagcttaatttgcagtcataatactatcattaactgagtgtttattacctgtcagttactgtgctaagtaccttatatattttctcttctttcatccttatgacaactctatgaagaaagttccattattgtcaccattttatagttcaggaaactgaggctcagaaaaatgaattgactggcttaaagtcacatagctagttaagggatgaaattgggacttgaacctacatttatctggcaacaaaaacctgagtgcctgatcactagaccatcctgcctcacagcctatctggccaaagtagagagagagtcaacgtttcatttcctgcatagctggaagctcagagaagtgagaggcttgttcagagtcccataacggactggacactaagccagcgtatggtgggtctggccccaggtcccaaacctgccccagcagagaaaactgggaggtgtgagacttcagggcatcctggaccttcctcctagagctggactgcctctccagagcaaccgagccataaacacaagcggctctttcaacacgacactgagcctgagtcactgcgtatttatagatgggcctcttctccttgcctcagctttgccaggatttatcaggttcacttagggttcagagggtgacaacctgtttatcatccaaggtgcccaagctggatgttgggacattctccgagaacaagatctggagttctgcctgtgtttagaccttgcctgacccccaacacccagactgatgcaattctccctatccaagttgtgcccccttctaccagatactccccatgcttaccccatcacaaccttatatacctagagaattcatggtctcgggttaaaatgggacagaaatgctgcttctttcaggaagacatcctggattgatctaggaaggttaaaaactttccctaaccccactgctctgagggagtaaactctctcattggtcagataattaaattaatcataataacatttgctaagactttgggaggacaaggtaggaggattgcttgagggcaagagttcgagaccagcctggctacatagcaagaccctgtttctacaaaaaaaaaaaaaaaaattacccaggtgtcgtggcgcatgcctgtagccccagctacttggaggctgaggcaggaggatcacttgagcccaggaggttgaggctgcagtgagctgtgattgcatcactacactccagcctggacaacagagagagagagagagagataccttgtttcaaaaaaaaagtaaaacaaacattttctaaggaccttctgtgtaccagataccatgctaagagttttaacattaccttttttttttttaagatggggttgcccaggctggagtgcagtggtgcaatgacagctcactgcagccttgaactcctgggctcaagtgatcctcccgcttcaacctcctgagcagctggaattacaggtgtgtgccacagcactcagattaacattacctttttgaatcttcacaattttgtaagttaaatattaatttatatcatctttatagatgaggaaactgaggcttacagaggtaaagtaacttgcccaagccacacgactttcctcctagtaagtagcaggactgtgctcgaaatctacattttccttggttcagtggtccaagctgtaggtgaccttggacaagttacttcacttctgagcctcagtttctttatctgtaaaatggagacactaataccaacagttatacagactgaataaacctggtatacagtagactcccaactgctgactcctgtcccacacctgctaaatttgttcattctcagttgcttaggctaatcaaccaggccacatctggctcagactctggggacttgaacctgggacccaggctcttccagccacccctgctcctctgcccctactctttctatctccttaatagtaatcatgtcctgagtgactcagaacacaggggcggggtgggtgaagcgggcaggggagagtaggatggcgagtgagtaggggcattgggggtggttgtgtacagaggcacagtagacagacctggctctcgctcctggggtctattttggatggggccagcctccaggctgctggaagctggagctggaggtatcagtgctgagttaacggagcggtccttggggccagatttagcagttgagttctgaccccagagggtggcttagctgcaggccctgggccaaagccacttctgtgattcctgccatggggttctggtctctgtacagggcaccctgctcctttctgctgtcttcaccacgccctccccagcccagtgcagagcctttaacttgagattcacacagatttgggatcaaggcctggctgttccacctactaacggtatgaccttggtgtcctaagggttgtgatgattaattggtgtgtccagatagggttgtcttcctcccacctcccccaacaccactgggcccatgaggtcagggctagttctcctgtcttcatcctacgtc

SEQ ID NO: 660 - DNA, 13841 bp, Mus musculus
  source 1..13841: mol_type = genomic DNA
cctcagaccaagacagaagccgggtgttcggggaggaagacaaagaggatccgagtgggatcccttccactcggtgtgacgcaggtggaagagacagtcgcagtttcgaagcaatatggattataaatctggcttgattccggacggaaatgctatggagaacctggagaagcagctcatctgccccatctgccttgagatgtttaccaagcctgtggtcatcctgccctgccagcacaacctctgccggaagtgtgccaacgacatcttccaggtcagcgctaggcagggccgggacctggaatccccccccaccccgcgcccccccccagacctcccgcggcttctcagaggcccttcccctctcagcctagaacacttgctccattaagaagccattcagagacccctgggaaggactagggctggaggtagagaaggggctaaggggaaagggggagctactccagtccttccgcagtgtactcatctagtccccaccctggccacagctctctcctctgctgggagagcttgctgttgattccccagtcaagagtcaaatacctcaagtgataagaggaggaggtgggtagagaggagagagaaaccaggccctggggccggagccagctccaggtggcagggggcccagactttgggaggcgggtggcaagaggaacgtaacctcagcagcatctcagaggctgcgtcctccaacagcgggcgaaggggccccatcttctgaggagggaaagggcacagttgaggcaacgcactggggagagcgtccagaaggacgacaggaaatgctcttccaaactcaggtctagttgcctattccaataatctcacgttcaggaacctgaggcaggaggattgctaagagtttagggtcagtctgtgctacctgattagtttgagataacaagatcctgccttaaaaacaaaacaaaacaaaaaaatttccctacagttatctttaaggtaatatcctaggagctggctctaattctaagaaagacctgtggtctccgtggtaaactgaggcatagcgagattatagttgcgcgtctgaagtcacacgacttgaactcatgttggctggtactgaacctcttgcctgtttgagtgcttcaaccacgatgcttcagcacatggttgggctgggccaaggccaggagccggtgggtgccctttggtttggcaagtgtgtttggggcaactggggcaaggagaactgagaccggagaggatgggaacgcccgccttttctgcaggctgccaatccctactggaccaaccgcggtggctcggtgtccatgtctggaggtcgtttccgctgcccctcgtgccgccatgaagtgatcatggaccggcatggggtgtacggtctgcagaggaacctgctggtggagaacatcatcgacatctacaagcaggaatgctccaggtcagtgtgcagctgaaatgccccgcctcctgaccacgcctcctgaccgcgcctctccccagacccctcccacctcagcgagccacattcatcagcaggcagagccaacaacctcttcctcagaccaaacctcagctcttgagttttgcgtatacggggagctagaaaaagagtcctgagactagggtgcaggggcgtgtgtgtgtgtgtgtgtgtgtgtgtgtgtgtttgcgctcatggtagagattggacctcattaggctagggctcttccactgaactacatccccagagcttgcagttttaagatggagccttgacatatagtgaaggttggtatcaacttgagatcctattgtttttcaatctcagctttaaaattttatttcttttattttgcttacaaagaagggtgtgtgtgtgtgtgtgtgtgtgtgtgtgtgtgtgtgtctgtgaataccagaagagggtactggctccctgtattagtcagggttcactatagaaaaataacatatattaatatatatgatcgattggaatggcttacaggctgtgtgtggtccagctagtccataatggctatctaccaacagaaggtccaaaaatccagtggctgtgcaatccacaaggttggatgtctcagctggtcttcattatgtgccagagtcccccagagagtaggctctaacgccagtgaaggaacagacttgctattgagagcgagagcagcaggccaatagacagcccccttcctccatgtcctctctatgggctgccaggacaaggtgtggcccagattagaagtggatctagattaaaagtggggcttcccacttcaaatgatttaattaaggaaaaactccctggctaagcagtggtggtgtacacctttaatcccagcactcaggagacagaggcagatggatctcagtgaatttgaagccagcctggtctacagagcgagttctaggacagccagggctacaaagagaagaaaccctgcctcaacaaacaaacaaaccaacaagcaaacccagccacttggattttagttcattacagatgaatcaagtggacaagattcagctctcccaatcgccctgaaaccagaactggggttacagacagctacgagctgccatgtgggtgctgggaaccaaacccaggtcctttgcaggaatagtaagttctcaactgctttccccagccttcacagtgactaccatatacctctttgttacatcgtgtctcttgttgctagaacacagcactccaaatggacgttgttgagccccaggcacggtggcgtaggccctgtggtcccagctactagggagtctgaggcaggaggatctcagtttcaaggttcatccaggctacattgcaaatgcagggcttgcctggacaactcggaaagatgctgattcgtagtcaaaccgtactaatgagaatgaggggctgggatgtagattggtgatagaactcctatctgacacaaggctctgtccggtccccagtgtcttctgcataccatgtgtggaggtcagggagcaactttgtggaatcagttctctcctgcctttacatgaattccagggattgaactcaggtcgttagccttgtgctgcaagcacccctcccccctgagcaatcttgtcagccacagatgcctattttggattgtggtggtggtggtggtgatgatggtggtggtggtggtggtgatgatgatgatgatgatgataatgacgacgacgatgacgacgacgtaatttatagtatacttacgtcagcctaatgctgtcgagttttgaaaattatgctgtgccttggaggtttttccctaataaggaaagacaatagctgcccttaagcagggtctgctcagagctccgcaggctacatcccggcatggttggcacagctctgagagacactgaggtgtgaaggactgagatcacagaaaacaagtgagtgtttgaccctgaggcctggccacagagagggaggtgttctcaggcagcctgcaggccctctccacccggctacacatcctgtaccacattcccagggcatcacaacaggtggcagtggcactagggaaatcctcaccactgtggccacagtatggggctcctgggctcaaagattgaaaataaaaacaaaaagatcaaaactgagtgtttggaaagtgactccctggagggggcccggtaagcctggatgtgactagtcatgcagagctgtggggaggtatgacagggacaccgatgggggggatagtcactgttgaagatggattggtgtaaggggctgggggagtgtagaaatggcagcttatccaactgaatgtaaggtctatctagcctcaactctaaaaccccagcctaggctgggaaatcacttatgtgggagaggagcatgccaggtgccctagttgaagaagccataaagggaggagacagaaagcagaagctgtgtggggctggctagatggttcagtgagtacaggtgcttgcagccaagcctgataccagagttctctcccctggacaaacatggtaaaaggagagaaccaactccttcaagctgttttctgacctccatgaatgtggtatggcacacattgcctccccctccaaatacacatatactaaataaatggcatttttttttccttttcttttttttcggggctggggaccgaacccagggccttgcgcttgctaggcaagtgctctaccactgagctaaatccccaaccccataaatgccatttttaatattaaaaaagaagagattcggggccttggagagcctttgtatagcggaggtttgctctgggcttctatgtagccttgcctttgccctccgaccaagtgcgcatgtatggcttagggtgcagagactgcccccttctaggacaccctcaggatgtgtttactgatgtatttcatttccacggtctccacacaaggtactgtatgttatagactcaggcaaggaaaacaagtaggcttcctgcctagcttgagggtacagtctcatgggttaaatatagatgtgaaagctgacatcagaataaattgcccaggccccagcaaccaaatctgtgggggctaaaattagagcaggagagttctggtctcttctgtctgtgctgctgggccaccttgggcaagtccatttatttcccaagactgttgtgtctcccatatggttagcaccttctggtctacctgggattctggggccctccccataccctctgcaccaactcaggccaggtccaatgctgggggcctgagttttagggctaggaacaggtttgttggatatcattagcttctttgaccttgggctcccagaagttaaaaaggagactgcttggggcagctcgatccactgggagctcgcatatggatgggtagcttcctgtgcttgaagctaggacaggacagggagatgggacaccctgacctgtgattcttctccacctcagtcggcccctgcagaaaggcagccacccgatgtgcaaggaacacgaagacgagaaaatcaacatctactgtctcacgtgcgaggtgcctacttgctccttgtgcaaggtgttcggggctcaccaggcctgtgaagttgcccccttacaaagcatcttccaaggacagaaggtactggctacagctgctgtgcccagaggattctggggtgtggatttgacccttgtggatgtgctgagccggcctttcaggaatagtctctcaggagggacttcccaggtcacagggacagcagccgatgcctccctgggggaggtgactgagctcatgggttatacttagagtcacttgagagcccctgggtgtggccatggggaagaggccatggcttccctgtcctgtccactctgtagtcccagacctctccacctgagcctcatatgaagcataaggcagatttgaggctcttccctgggccctggcaacccagcatcctgccacggagtaagctgtagccctactgtctgccacacttcactcgtctctttcttctagaactttccaatctattccttctctccgaaagtagcaggctggggatggtagcacaggcctttaagcctagcactcaggaggcagaggcaggatcgctatgaatttgaggccagcctggtctatattgagttctgggccagccagggcagcacagtaaggcccctgtctttaaaaaaaactggggtgggggcaagaaagaaagaacgaaagaaaaggaaggaaggaaggaagggagggaaacttgttttcttttgtttctttatcagtgctttgctgtgtgttttgggttgctcagtttccctctctgggcctcatctgtccataaaggatacatctgtggtagtctctgctttagacctgagctgcacctcagaaggagggatagcaaccctattggtgactctgtcaaagacaggggcatgaacaccatgttgctataattctggagaagcagcgggccctgagtctatttctgtctctcctctctcacgcccctgccgtccagactgaactgagcaattgcatctccatgctggtggcagggaacgaccgagttcagactatcatctcgcagctggaggactcctgccgagtgaccaaggtgagggtgtagagctgccctgtcagcggtgaggagttcaagcctccggtgcagcctgtctccgggaaagccctgagctatggtgcagattggggtttggagtcttgggtacccaacagagatggcaggaaaggacacagtcatttctccatcacccttggcgaacacagcagctgtgtcagaccctgtagaaggacaagacagacccagttggtccctgactgcagagattcaccaataactccctgaattgttccagcattaatcatttatcgatagagcaagagtcctgacctgtaaaagctcacacctgactcaggactgtggaacctcaggggctctggaacaattcaacattctgcacttcttccttgcttgaattttattttccatgtttactggtgttttgcctgcacatatctgtgcctcatgtgtgtgcagtgccagaggaggccagaagagggagccagatcccctggaaatggagttccaagatggttgtgagccaacacaaaggtgctaggaactgaatcagggtcttctggaagagcaggcagtgctcttaaccaccaagccatctctccggtcttctttctgtctttctgcctttgatttgatgtttgtttgtttttctggacagcgtttctctgtgtaaccctggttgttctggaactcactctgtagtttgaactcagagctccaggccagccagggttatagaattagaccctgtctcgaaagaaagaaagaaagaaagaaagaaagaaagaaagaaagaaagaaagaaagaaagaaagaaagaaagaaagaaaagaacagacagagggagggacggagggagggagggaagaaaaagaaaagaacagaacagacagagggagggacggagggagggagggagggaagaaaaagaaaagaaaggaaaaaaacctggtcccttcttgaggagggttggagctggtaagttggggaagagccatccatcatcaccacaagtggactgctctgtggagtggagaggaccattgtaaccctgagaggtatctcatgccgaaaggcaccactgccaagcccattcgactttttaagaccaggtctcactaggttgcaccaattcagccttctgtgggtgcgggcattttcctcttcgatagctttgctccgtgtgcgatcgagtcttgccttgctgcagagagtccctggggccctttctgactcagaaagtgggttggcacttcatgggatgtgactgtaggatttctgtcctcaggaaaacagccaccaggtgaaggaggaactgagccacaagtttgacgccctctacgccatcctggacgagaagaagagtgagctgctgcagcggatcactcaggagcaggaggagaagctggacttcatcgaggccctgatcctccagtaccgagagcagttggaaaagtcgaccaagcttgtggaaacagccatccagtccctggatgagcccggaggggccaccttcctcttggtgactggaatctgaagggtttgggtagatttgaactattactctttcctgatcttcaaatgggcctgggctgtttaaatcttggtgaaatgtcaggcatctccggtcactacaggctcctgaccataaataatcccagttcttgggcagctgagacaggaggactccaagttcaggggaaagcaggacagtttggtggaatagtatctcaaaataaaacatgccaggctaggcttggtgacacacgactttgctatcccagtacttggaagacacaggcagaggcaagaggatctctgtgagtttgaggctagcctggtctatagagcaagctccaggcagccaagactgcatggtgagaccttgtcaataaataaacaaaaaaaacaaacataagaaatattgggagaggagagatgattctacggctaagaacatgtcttatgtcgaacacttttaatcccagcactggggagacagaggcaggcagatctctgtgactttgaggccagcctggtctacagagtaaattccaggacaaccagagctacataatatcgagaacttgtctcaaaacaaaacaaagaaaaataacactttggttttgttcttacaaaggacctgggtccagttcccagcacccacattgtggcttacaactacccatagctccagtgccagggtacccaatgcccatttctcacttccaagggcaccaggcacatatgtggttcacatacacacacgcaggcactcatacatacacttgaaacaaaaataggtcttttaaacaatatcagcaaaacccagaggggctggagagatggctcaggggtcaagagtgcttactattctttcaaagaacttgagttaggttcccagaactcacgtctggcagctcacaaatacccataatcccaagagcagtggaacttgacaccctcttctggcctccaggggctgcaacatacatacatatacatacatatacatacatacatacatacatacatacatacatacacacatacacacatacatacacacatatatacatatatacacatacatacacatacatacatacacatacatgcatacacatacatacatacatgcattacatacatatgcacacatacatatacatacatatatacatacacacatacatacattacatacacatacatacatgtatatacacacatatatacatagatacacacatacatatattacataagtacatacatgcatacaaagacaattttaatgtgagtacactgtagctatcttcagacacaccagaagagggcattagatcccattagagatggttgtgagccaccatgtggttgctgggatttgaactcaggacctctagaagagcagtcagtgctcttaatcactgagccatctctccagcccccaagaaaaatttaaaaacatattaaaaaaactacaatacccagaatatatgccttcaagctcttatggtctagctttgtccaacccatggaagaaagtttggttgactctcgtccaggagacttcagacattttgagtgcttggtcagagaaccctggcttcctgcccagacagtagaaacagactggggttcatgttggccaagatctgtgagaaaatgtccgagttctatttaacagggcaggattcaagttacgcctgtaccatggaatggtacctcgagtctatcctttggaatttcgatgttaacctctgttctttttctccacagagtgccaagccgctcatcaagaggtcagtgttcccaggactacagcctgtgtccctagttcccctcagggcttctgacacctgcccaatggatccctgtgcattagttctgccaggatcgggggggatcgggactcaccccagaccatgtgccctactctgttagatcatccactctgcttgaccctaaagaagaaatgtcctctgccccttcatcccctcacttcagggatggattgtgggactgggacggacccacatagagccaaggctaagctgtcccttcctgtatgcagcccgagacctcaccctatctctctcccccacagcattgtagaagcttccaagggctgccagctggggaagacagaacaaggctttgagaacatggactactttactctgaatttagaacacatagcagaggccttgagggccattgactttgggacaggtaaaggacatgattgtgctacttgctttgtgcatgtttgaccttggaaaggcagtgctcctcttgagcgctgatcggaagcagattcatattttaaaaaagccagatttacgcagtcaatgttgacagggcctctctaaggagccctgtcggtcttagaattctctaagtggaccaagatggtctggaacgcacagagatccgcccgtctctgctttctgagtgccgagatgaaaggcgtgtgccctccatgcctggctccacagtcaacttagtgatgaatccagggcctagcactgtgcccggttcataattattactaagtaaattatgtgcggatccaaagttcatgacatctggcattagacagatctgacttcaaatccccattctgccatttttgtgttatctgtgtgacctttggcatccttccaccctcctcctttgtggtctcccatttcgttggattttttgtaaagatttatttatttattatatataagtacactgtagctgtcttcagacaccagaagagggcatcagatctcattataaatggttgtgagccaccatgtggttgctgggatttgaactcaggacctctggaagagcagtcagtgctcttaaccactgagccatctctacagccctcgttggatttttgagaggaaccattactagtgattgaacccaggtcttggactcttacctggaaagtttgggcaggaacatagtgagttggaggccagcctaggctacatagtcaaaaggataattcaagacaggttgcactgtgttaacgtaacatggtgaaggtttgagcgatccacctccacccccagcagggagagcataccaacagcgttccttgagtccattcgtgaagatcgaggtggcctcaaactcacagagatctgatggcctctatttattgcctgagtgcgggcattaaagtcatgtgccactacgtccagccccgagcccatttttttgttggactgtctatgctctgagcactgagatgctgtcgtaaagacgtaaatcccatctaggatgcggctctgttagcttcagtttgtagcgtaggaaactgagtttagacagagcaatcccttgttcaaggccacatagctcgtaagtagctggtgcagacttcaccttgggccacttggctcacaagaccctctgaggacataggagacaacagaaagacaccatggcacctgcccgtagtcattctctggggagaactattttgagcaataattacgatttagattcaaccacgggccttctggattatcgcggttatgcgtgggtcctgggtgtttgattggaggttttagttgacaattttgttgtcttgcttttttgtttgtttgtttgtttgtttgtttgtttgtttgtttgagaccgggtgttactatgtagcccaggccatccttaaatttgtgactaatctcccacctcagtttcctgagtgctggatttacagggtgggcgtactggtttgtagatgggcttgagaaacgttgactctgcaattctctggaaaggagtggggaaggggcagggtcctgttaggaaggtttgaaggtcacaccccaggatgagaaagtgagaatccaagctgtgggggtggggtgggggaagggaggtggggggatggggtggggacatgagactgtcccactctcctgaacagaaacatccccctccccacccagcctccacccctcccaagactgcctctctgaggactgaggaatcaggcaaacaaggagaccctgagccagcagatttcaaaggctgagcaaactcctttaagccaaggactctgatccctaagagtaggccctgtctgccctgcctcccctttgtgatatgtctgttcctctgagaagcacagaaccgttagtgtgactcctgcctccctgaggccccagacaggccagtggtgaaggacgctggtgtcttggagagaaaggactatgacctggaagatggagggaggcaggatatgggggctggactctgtgagcttgagtcctacaagccactcccaggtccctgctgcctttaagcgcccatttgatcccagaatagggactgatgtcctctgtaggccaatcttctcacagctgttgtgagaagccagtcccatcttaacacagtcgtctcctcacagatgaggaggaggagtttactgaagaggaggaggaggaggatcaagaagagggcgtgtccacagagggtaaggaaggtaggagctctgccctcggaatgccaggctacactttgccagggtgtgtgcttagtgtctattattattattattattattattattattattattattatcttggctcacctcttttgttgcagggggagggttatgcatgcacagatgcatgtttgcacacttatatgctcagaggtgcccatgcagaggcccaaggctgacatcaagggtcttttgaatcactctccaccacattcactgaggcagggtctcttaatagaacccagagctcatggatttgctagtctagctagccatgttgcttagggatccttttttctaccttctgagctctggaatcaaggggctaccatggtcacctagcacttctttgagtgctggggatctgaattctggcccttgaatttattatgtagggacccgcccaccaagccattttgctgcccagttgctgctactgccccctccccttttcttcctcttttcttatacccatggtttgccaggaacttactgtggggaccaggttggcctcttagctgggatcaaaggcatgccaatttagtaaccctagttactaaagccaaattccaatccagctaaagtaacttcaaagagtctaaggcagaggttctcaacctgtgccttgcaactcatttgagtgggggtgggggtggaatgaccctttcacaggggtcacctaaggccattggaaaacacagagatttacatcacaattcataacagtagcaaaatcacagttacgaagttgcaatggaaataattttatggttggggtcaccacatgtcgaagcactaggaaggttggggaccactgctgtagggtacctgtgacccactggattctgactgctaagttctacccaggctggagattggagatttggttttatttggctagtcgccacagctcaaaaggccctgggtcctctccaatctgtgtctcaccatgagcctgtgtctggttttctttcaggacaccaatgaagaactggatgagtgagacgccctctggatgcagagatgggggaggggcgggacaggcccatctcgggatggggttagggctccttgggggcaccatagggaagtgtgtcttctctctgctcagagagcagggactagcatagaagccccaccattgtgtccagcagctgctgaaacacgattggaaatgtatccaaaaatgtcccaggacacttttttacgttggtgcaaaatgaaatattttgtatgtttttaaaatgtgatttttgtataaacttgtatatgtatgccaatttggtgctttttgtacaagaacttttgtatgatcatgcctggtcattgtgtgaccagcgattgtcacaaagggggaaggaagccaagttcattgagctgcccacttcctttccttggcgggagggttgggtctcactcaaaggcctagaaaggggcaatgtactgtacttcagtacccatccccaaacatggggagaggactgaatttgtgttatatgttgttttaataaatgcagaaggggctgggtattggggggtgcacaccctttgatcccagcactctggaggcagaggcagttggatctctatgagttcgaggctagcctggtctacatggagagttccagaccagccagggcaacatagagagactctctgtctcaaaaataaaaaaatgaaaaagaataaaaaataaactcacagcgctcttttcctgtaact

SEQ ID NO: 661 - DNA, 1771 bp, synthetic construct; identical to SEQ ID NO: 579
  misc_feature 1..1771: note = Synthetic
  source 1..1771: mol_type = other DNA

SEQ ID NO: 662 - DNA, 1886 bp, synthetic construct; identical to SEQ ID NO: 580
  misc_feature 1..1886: note = Synthetic
  source 1..1886: mol_type = other DNA

SEQ ID NO: 663 - protein, 1122 aa, Homo sapiens
MEPSEVPSQISKDNFLEVPNLSDSLCEDEEVTFQPGFSPQPSRRGSDSSEDIYLDTPSSGTRRVSFADSFGFNLVSVKEFDCWELPSASTTFDLGTDIFHTEEYVLAPLFDLPSSKEDLMQQLQIQKAILESTESLLGSTSIKGIIRVLNVSFEKLVYVRMSLDDWQTHYDILAEYVPNSCDGETDQFSFKIVLVPPYQKDGSKVEFCIRYETSVGTFWSNNNGTNYTFICQKKEQEPEPVKPWKEVPNRQIKGCLKVKSSKEESSVTSEENNFENPKNTDTYIPTIICSHEDKEDLEASNRNVKDVNREHDEHNEKELELMINQHLIRTRSTASRDERNTFSTDPVNFPNKAEGLEKKQIHGEICTDLFQRSLSPSSSAESSVKGDFYCNEKYSSGDDCTHQPSEETTSNMGEIKPSLGDTSSDELVQLHTGSKEVLDDNANPAHGNGTVQIPCPSSDQLMAGNLNKKHEGGAKNIEVKDLGCLRRDFHSDTSACLKESTEEGSSKEDYYGNGKDDEEQRIYLGVNEKQRKNFQTILHDQERKMGNPKISVAGIGASNRDLATLLSEHTAIPTRAITADVSHSPRTNLSWEEAVLTPEHHHLTSEGSALGGITGQVCSSRTGNVLRNDYLFQVEEKSGGINSEDQDNSPQHKQSWNVLESQGKSRENKTNITEHIKGQTDCEDVWGKRDNTRSLKATTEELFTCQETVCCELSSLADHGITEKAEAGTAYIIKTTSESTPESMSAREKAIIAKLPQETARSDRPIEVKETAFDPHEGRNDDSHYTLCQRDTVGVIYDNDFEKESRLGICNVRVDEMEKEETMSMYNPRKTHDREKCGTGNITSVEESSWVITEYQKATSKLDLQLGMLPTDKTVFSENRDLRQVQELSKKTDSDAIVHSAFNSDTNRAPQNSSPFSKHHTEISVSTNEQAIAVENAVTTMASQPISTKSENICNSTREIQGIEKHPYPESKPEEVSRSSGIVTSGSRKERCIGQIFQTEEYSVEKSLGPMILINKPLENMEEARHENEGLVSSGQSLYTSGEKESDSSASTSLPVEESQAQGNESLFSKYTNSKIPYFLLFLIFLITVYHYDLMIGLTFYVLSLSWLSWEEGRQKESVKKK

SEQ ID NO: 664 - DNA, 5912 bp, Homo sapiens
  source 1..5912: mol_type = genomic DNA
gagttacctttggagcccgaaaggaggaaggaagcaaaatatcaacaacagccgaggcggctcaggcgctcggccccggttccccgcttgcctgccgcccgcctgctggcccccgcgcccacgacgggggcccaggcctcacggcgccgcccagggcccgcgcggacgccggcctcatttattattctccccgcccggagctgcggcttcccggtgttgaagatcccccggaccaggggcgagggctacccgctctttgccgtgacaacaccgttcccccagccgggctggaggctgtgcagaaggtatcctgcagaccatgaactgagcactgttcccagaccgttcatgagcacagtgtaaggtgtgccgagacccaccacccagcgagcccctcccctccgtagcactgaggacccccggagaagatggggaggaaaaagattcagatccagcgaatcaccgacgagcggaaccgacaggtgactttcaccaagcggaagtttggcctgatgaagaaggcgtatgagctgagcgtgctatgtgactgcgagatcgcactcatcatcttcaaccactccaacaagctgttccagtacgccagcaccgacatggacaaggtgctgctcaagtacacggagtacaatgagccacacgagagccgcaccaacgccgacatcatcgagaccctgaggaagaagggcttcaacggctgcgacagccccgagcccgacggggaggactcgctggaacagagccccctgctggaggacaagtaccgacgcgccagcgaggagctcgacgggctcttccggcgctatgggtcaactgtcccggcccccaactttgccatgcctgtcacggtgcccgtgtccaatcagagctcactgcagttcagcaatcccagcggctccctggtcaccccttccctggtgacatcatccctcacggacccgcggctcctgtccccccagcagccagcactacagaggaacagtgtgtctcctggcctgccccagcggccagctagtgcgggggccatgctggggggtgacctgaacagtgctaacggagcctgccccagccctgttgggaatggctacgtcagtgctcgggcttcccctggcctcctccctgtggccaatggcaacagcctaaacaaggtcatccctgccaagtctccacccccacctacccacagcacccagcttggagcccccagccgcaagcccgacctgcgagtcatcacttcccaggcaggaaaggggttaatgcatcacttgactgaggaccatttagatctgaacaatgcccagcgccttggggtctcccagtctactcattcgctcaccaccccagtggtttctgtggcaacgccgagtttactcagccagggcctccccttctcttccatgcccactgcctacaacacagattaccagttgaccagtgcagagctctcctccttaccagcctttagttcacctggggggctgtcgctaggcaatgtcactgcctggcaacagccacagcagccccagcagccgcagcagccacagcctccacagcagcagccaccgcagccacagcagccacagccacagcagcctcagcagccgcaacagccacctcagcaacagtcccacctggtccctgtatctctcagcaacctcatcccgggcagccccctgccccacgtgggtgctgccctcacagtcaccacccacccccacatcagcatcaagtcagaaccggtgtccccaagccgtgagcgcagccctgcgcctccccctccagctgtgttcccagctgcccgccctgagcctggcgatggtctcagcagcccagccgggggatcctatgagacgggagaccgggatgacggacggggggacttcgggcccacactgggcctgctgcgcccagccccagagcctgaggctgagggctcagctgtgaagaggatgcggcttgatacctggacattaaagtgacgattcccactcccctcctctcagcctccctgatgaagagttgacaatctcaccgcccgcccttccctgccccgggctcctcccgctcgacccccacttcctttcttgtgcttcgtgtcctgttgacggttacatttgtgtataattattatattattattattattattatattttttttaatttggattctcgctttggagagggggatgctctcatcccctctttctgtaccccccaccattttcactggctggggggctctctttttcgcgggaaggggggacactttgcacgttgtacacatatgctgcaggaagggggtggggggcccaataaggcctttgggaaaggacaggtgccgagccctgcatgtggagccctcccaccccacccccagatagagggaaataaccaaaaaactaccaaacaacagaaacccacactctagactgaaaccccaaagtgggcttgatgggtgggtttgtgtttcaaggggaaagtgaggcagaggttctgaaaagggtctctgtttttgtgttcatgtagccataggcacatggagcagaatacttaagcctggcccccaaatgcccctgcacacacacgtgccacacctgcgctgattcttgtgtgtgctgcacccccaaggtgtgtgggtgctggctgagctttgggccgggaaggcagcctgggaatctgaggctggagacaggggtttgaggtgggggcctctctggaagcacatttggagggaaagacaagagagccatgaggagagggctgaggagggcagaagggctaggcagggggcaaattgagcccctcccttccccagtttttctctaagatatacagtgcaatagctccccacccctcagttgacgccagccctgtaaagctggccacagtgtgcagggagaatggggagagggtcttcagtgaggtggctggggcgagagtcggcctggacttccctggggtgctccaggccagagctctttcattggggcgagtgtggtgaggggacgtccttggtcttgcacgcacactacctgggggagtcaacactgggatggtctgtggggtgggagggcctacggatgggtccgtagaggtcccacctccctcattcctccttggcccctctccctagcttctcctgttagctccttctgctcctgaccccacctccttgctcttggcgcccctattgtctctggctacctccttgtcccaccacctccaggctgcatcccaccttccctcttggctactgtaattgtaaatagcgacctttggaaaacgttagcggtgtaacagtccaggaaactgtttttttttgttgttgttgtattgatatgaaatgagattctatttttgtcaaagtatattgtaataataatgactcaaacggcccgtactgtacagacgagattcttctgctgttgttcttgctcccctcccctcctctgagtccgcccctccctgctgcctcctcagtggggcagtgggcaaggggcccaggggcagccgaagcacggggtcctgagacctcaggcaggattggagatcaaaccagagggggcaggcccccagcctgctctctaggatcaccccccgccctaaggggcctggcctggggtgacgtggccaggcagactgtctgccccactccttcacacaagcccagctcctctgcccaaggggtgcggcgcccccttggggtttcctcccagttggagagtagagttaagacaaggcccagttttgtgttagccgaccgtctttgcccacctctatgacccagcctcttgcagtattcccatacttgatgcagggaaggaaccagaagcagaggggcctctacgcaggtacacacgtgtacctgagtgtgttcatgagggcatctggtgtttatgtgtctgagtgtagctttgtatttatgtgtgtgtgtgtgtgtatgtctgattgcacgggtgtacttttgtatttatgtgtgtgtgtggttgcacgggtgtgcctctgtgtgtctctgaccctggctgggtgtgtgtgcaaatctgtgtgactggagctctaggggcatctctgtgtctgagtgtgcctggtgtgtgtttacaaagggagagttggctgctccagctccacagccctgggaccccaactcctgtcttccctgctcctttccctgtgttcaccctcagctctgacacattgaactgcagttggggggattggcagttagccctctgtgcttctccctgcagccctacctctgccaaggtctctccctccagggacctctgcttccacccacatatgtccacttagtcacccacacttgacacagttcctggagtaccctcttcccccaaccccagacctgctttcagagcaaaactcaagtccctcttcctccgtgaagcttctccctcagctgagcagtgatcacttactcactcttaaccccaatccgctgactgggtggggacagcacgtccagccttcccacctctcctgcaggcttctagacggagtttcaaaaactgatgagcctcgatccagggcttgaaagaagccagggtgtaatcttgttcatgcatgcgtccccagagcctcgcccagtgcctggcacatagtaggcactcaataaatgctgaatgggtgaatagttgaatgataggtgctcaataaatgaatgaatggccttcccttctcaggctattcccaccattagtctgcccacctttctaggctgggcttggccaccattaaacacggggtgggggtgagggcccctgcaattcacggtgcaatattcaccagttttgccctctgcctcataaaggcaaacctggcttttgattaccatgtgtggatgtttcagtgtcctttcttctctgtccctggggatggggtggtctgtgaatatgtgacatttctgcagttcagtatccgaaggtttctcttgggggtaggggctcctgggcggccagatgaatgggtccctgggaacccagacctcagatgaggacttaatgtcttcttcctctcaagccaaattcgcctccacccactccctctgaagaactgggcatttgccaaagtaaccactggagtcatctaatggccctccccctccccaggtttcccacagctttcagggacagtgggcaagaggacacccccccccaccacctcagtggaacacaccattctccccccctcaacagcacactcagtgcagcaagactgacccctgaccccctcccagccctccctaccttggacaggaaggaagtaatgcaccttctcttgctgattatttatttgtttggagagacagaaatgtaaaagtgtatctagaaatatctatatctctatatatttttaactgactctttggaatcccctggggtggggtgaggggtaagtttaggctttcgcggaggggaggagacatggagcctgggaactccttgttctcccctctgctgcctctccccaccccttaaagcagttggtagaaggaatggtatttgtatggggggagggaggctggaatggagaatctggattctctcctcttccccattctccagagggagggaggtggtgaggaagaggaagggaggggcaggatgggccatggaggtgccccacccccacacctgacaatcacccacactcctggggctcttcctgggtcctggggcagggcgagtccaagtgtgaggctgttgatttgttttcaatatttcttttcgtgctgtatggtgatgctttcttagtattctacacaataagaaaagacaaagtcctcgagattcttatgagttttgtttgaaaactctttcactatatttgttgtaaagaggtttactattaaaagaaaaagaatacacgtttctgata

SEQ ID NO: 665 - DNA, 5765 bp, Homo sapiens
  source 1..5765: mol_type = genomic DNA
ataccgtgtgctccccttggcaagtcggttcctgtcccttaagctgagactgcagggcctgccccccatttgagttcttagggtgcctggggcctgagaccacccctgccctaggcccagctttcctggactgcctgcccccacaaaccaacagcccgcccccaggtccccagtcgaaggtatcctgcagaccatgaactgagcactgttcccagaccgttcatgagcacagtgtaaggtgtgccgagacccaccacccagcgagcccctcccctccgtagcactgaggacccccggagaagatggggaggaaaaagattcagatccagcgaatcaccgacgagcggaaccgacaggtgactttcaccaagcggaagtttggcctgatgaagaaggcgtatgagctgagcgtgctatgtgactgcgagatcgcactcatcatcttcaaccactccaacaagctgttccagtacgccagcaccgacatggacaaggtgctgctcaagtacacggagtacaatgagccacacgagagccgcaccaacgccgacatcatcgagaccctgaggaagaagggcttcaacggctgcgacagccccgagcccgacggggaggactcgctggaacagagccccctgctggaggacaagtaccgacgcgccagcgaggagctcgacgggctcttccggcgctatgggtcaactgtcccggcccccaactttgccatgcctgtcacggtgcccgtgtccaatcagagctcactgcagttcagcaatcccagcggctccctggtcaccccttccctggtgacatcatccctcacggacccgcggctcctgtccccccagcagccagcactacagaggaacagtgtgtctcctggcctgccccagcggccagctagtgcgggggccatgctggggggtgacctgaacagtgctaacggagcctgccccagccctgttgggaatggctacgtcagtgctcgggcttcccctggcctcctccctgtggccaatggcaacagcctaaacaaggtcatccctgccaagtctccacccccacctacccacagcacccagcttggagcccccagccgcaagcccgacctgcgagtcatcacttcccaggcaggaaaggggttaatgcatcacttgaacaatgcccagcgccttggggtctcccagtctactcattcgctcaccaccccagtggtttctgtggcaacgccgagtttactcagccagggcctccccttctcttccatgcccactgcctacaacacagattaccagttgaccagtgcagagctctcctccttaccagcctttagttcacctggggggctgtcgctaggcaatgtcactgcctggcaacagccacagcagccccagcagccgcagcagccacagcctccacagcagcagccaccgcagccacagcagccacagccacagcagcctcagcagccgcaacagccacctcagcaacagtcccacctggtccctgtatctctcagcaacctcatcccgggcagccccctgccccacgtgggtgctgccctcacagtcaccacccacccccacatcagcatcaagtcagaaccggtgtccccaagccgtgagcgcagccctgcgcctccccctccagctgtgttcccagctgcccgccctgagcctggcgatggtctcagcagcccagccgggggatcctatgagacgggagaccgggatgacggacggggggacttcgggcccacactgggcctgctgcgcccagccccagagcctgaggctgagggctcagctgtgaagaggatgcggcttgatacctggacattaaagtgacgattcccactcccctcctctcagcctccctgatgaagagttgacaatctcaccgcccgcccttccctgccccgggctcctcccgctcgacccccacttcctttcttgtgcttcgtgtcctgttgacggttacatttgtgtataattattatattattattattattattatattttttttaatttggattctcgctttggagagggggatgctctcatcccctctttctgtaccccccaccattttcactggctggggggctctctttttcgcgggaaggggggacactttgcacgttgtacacatatgctgcaggaagggggtggggggcccaataaggcctttgggaaaggacaggtgccgagccctgcatgtggagccctcccaccccacccccagatagagggaaataaccaaaaaactaccaaacaacagaaacccacactctagactgaaaccccaaagtgggcttgatgggtgggtttgtgtttcaaggggaaagtgaggcagaggttctgaaaagggtctctgtttttgtgttcatgtagccataggcacatggagcagaatacttaagcctggcccccaaatgcccctgcacacacacgtgccacacctgcgctgattcttgtgtgtgctgcacccccaaggtgtgtgggtgctggctgagctttgggccgggaaggcagcctgggaatctgaggctggagacaggggtttgaggtgggggcctctctggaagcacatttggagggaaagacaagagagccatgaggagagggctgaggagggcagaagggctaggcagggggcaaattgagcccctcccttccccagtttttctctaagatatacagtgcaatagctccccacccctcagttgacgccagccctgtaaagctggccacagtgtgcagggagaatggggagagggtcttcagtgaggtggctggggcgagagtcggcctggacttccctggggtgctccaggccagagctctttcattggggcgagtgtggtgaggggacgtccttggtcttgcacgcacactacctgggggagtcaacactgggatggtctgtggggtgggagggcctacggatgggtccgtagaggtcccacctccctcattcctccttggcccctctccctagcttctcctgttagctccttctgctcctgaccccacctccttgctcttggcgcccctattgtctctggctacctccttgtcccaccacctccaggctgcatcccaccttccctcttggctactgtaattgtaaatagcgacctttggaaaacgttagcggtgtaacagtccaggaaactgtttttttttgttgttgttgtattgatatgaaatgagattctatttttgtcaaagtatattgtaataataatgactcaaacggcccgtactgtacagacgagattcttctgctgttgttcttgctcccctcccctcctctgagtccgcccctccctgctgcctcctcagtggggcagtgggcaaggggcccaggggcagccgaagcacggggtcctgagacctcaggcaggattggagatcaaaccagagggggcaggcccccagcctgctctctaggatcaccccccgccctaaggggcctggcctggggtgacgtggccaggcagactgtctgccccactccttcacacaagcccagctcctctgcccaaggggtgcggcgcccccttggggtttcctcccagttggagagtagagttaagacaaggcccagttttgtgttagccgaccgtctttgcccacctctatgacccagcctcttgcagtattcccatacttgatgcagggaaggaaccagaagcagaggggcctctacgcaggtacacacgtgtacctgagtgtgttcatgagggcatctggtgtttatgtgtctgagtgtagctttgtatttatgtgtgtgtgtgtgtgtatgtctgattgcacgggtgtacttttgtatttatgtgtgtgtgtggttgcacgggtgtgcctctgtgtgtctctgaccctggctgggtgtgtgtgcaaatctgtgtgactggagctctaggggcatctctgtgtctgagtgtgcctggtgtgtgtttacaaagggagagttggctgctccagctccacagccctgggaccccaactcctgtcttccctgctcctttccctgtgttcaccctcagctctgacacattgaactgcagttggggggattggcagttagccctctgtgcttctccctgcagccctacctctgccaaggtctctccctccagggacctctgcttccacccacatatgtccacttagtcacccacacttgacacagttcctggagtaccctcttcccccaaccccagacctgctttcagagcaaaactcaagtccctcttcctccgtgaagcttctccctcagctgagcagtgatcacttactcactcttaaccccaatccgctgactgggtggggacagcacgtccagccttcccacctctcctgcaggcttctagacggagtttcaaaaactgatgagcctcgatccagggcttgaaagaagccagggtgtaatcttgttcatgcatgcgtccccagagcctcgcccagtgcctggcacatagtaggcactcaataaatgctgaatgggtgaatagttgaatgataggtgctcaataaatgaatgaatggccttcccttctcaggctattcccaccattagtctgcccacctttctaggctgggcttggccaccattaaacacggggtgggggtgagggcccctgcaattcacggtgcaatattcaccagttttgccctctgcctcataaaggcaaacctggcttttgattaccatgtgtggatgtttcagtgtcctttcttctctgtccctggggatggggtggtctgtgaatatgtgacatttctgcagttcagtatccgaaggtttctcttgggggtaggggctcctgggcggccagatgaatgggtccctgggaacccagacctcagatgaggacttaatgtcttcttcctctcaagccaaattcgcctccacccactccctctgaagaactgggcatttgccaaagtaaccactggagtcatctaatggccctccccctccccaggtttcccacagctttcagggacagtgggcaagaggacacccccccccaccacctcagtggaacacaccattctccccccctcaacagcacactcagtgcagcaagactgacccctgaccccctcccagccctccctaccttggacaggaaggaagtaatgcaccttctcttgctgattatttatttgtttggagagacagaaatgtaaaagtgtatctagaaatatctatatctctatatatttttaactgactctttggaatcccctggggtggggtgaggggtaagtttaggctttcgcggaggggaggagacatggagcctgggaactccttgttctcccctctgctgcctctccccaccccttaaagcagttggtagaaggaatggtatttgtatggggggagggaggctggaatggagaatctggattctctcctcttccccattctccagagggagggaggtggtgaggaagaggaagggaggggcaggatgggccatggaggtgccccacccccacacctgacaatcacccacactcctggggctcttcctgggtcctggggcagggcgagtccaagtgtgaggctgttgatttgttttcaatatttcttttcgtgctgtatggtgatgctttcttagtattctacacaataagaaaagacaaagtcctcgagattcttatgagttttgtttgaaaactctttcactatatttgttgtaaagaggtttactattaaaagaaaaagaatacacgtttctgata

SEQ ID NO: 666 - DNA, 5444 bp, Mus musculus
  source 1..5444: mol_type = genomic DNA
tgcgcggtgcctacgtcggcctcgagtctggggctggaggagttgcctttggagcccgaaaggaggaaggaagcaaaatatcaacaaccgtcgaggcggcttgggcgctcggctgcgtgcctgccgcccgccgccgccgcccccgcgcgcaccagggggtcccggccctgtggcgccgcccaggccgcgtggacgcggcgccttcgctgtttcccgtcggagctgcggcttcgcgtaaccgaggattcggcggaccgggccgaggctccgggcgccgtgacaccccgtcccccccacgggctggaggctgtgcataggtgttctgcagaccatgaactgatcactagtccccagacattcatgagcacagtgtgaggctcctgatcaccacccagcagccccttcctctctggcactaaggacccccggagaagatggggaggaaaaagattcagatccagcgaatcactgatgaacggaaccgccaggtgaccttcaccaagcggaagtttggactgatgaagaaggcctacgagctgagtgtgctgtgcgactgcgagatcgcgctcatcatcttcaaccactccaacaagctgttccagtatgccagcaccgacatggacaaggtgctgctcaagtacaccgagtacaacgagccacacgagagccgcaccaatgctgacatcatcgagaccctgaggaagaagggtttcaacggctgtgacagcccagagccggatggggaggactcactggagcagagccccctgctggaggacaagtaccggcgggccagtgaggagctggatgggctcttcaggcgctatgggtcatctgttccggcccccaactttgccatgcctgtcacagtgcccgtgtccaatcagagctccatgcagttcagcaatccaagtagctctctggtcactccttccctggtgacatcatcccttacggacccacggctcctgtccccccagcagccagcactacagagaaacagtgtttctccaggcttgccccagcggcctgctagtgcaggagccatgctgggtggagacctcaacagtgctaatggagcctgccccagccccgttgggaatggctatgtcagtgcccgagcttcccctggcctcctccctgtggccaatggcaacagcctaaacaaagtcatccctgccaagtctccgcccccacccacccacaacacccagcttggagcccccagccgcaagcctgatctgcgggtcatcacttcccagggaggcaaagggttaatgcatcatttgactgaggaccatttagatctgaacaatgcccagcgccttggggtctcccagtctacccactcgctcaccaccccagtggtttccgtggcaacaccaagtttactcagccagggcctccccttctcctccatgcccactgcctacaacacagattaccagctgcccagtgcagagctatcctccttaccagccttcagttcacctgcagggctggcactaggcaatgtcaccgcctggcagcagccccagccgccccagcagccacaaccgccacaaccgccacagtcacagccacagccaccacagccacagccacagcagccacctcagcaacagccccacttggtccccgtttctctcagcaacctcatccctggcagccccttgcctcacgtgggtgctgctctcacagtcactacccacccccacatcagcatcaagtcagaaccagtgtccccaagtcgtgaacgcagccctgcacctcctccaccagctgtgttcccagctgcccgccctgagcctggcgaaggtctcagcagcccagctggaggatcctatgagaccggggaccgggatgatggacggggggactttgggcccacactaggcctgctgcgcccagccccagagcctgaggctgagggctcagctgtgaagaggatgcggctggatacttggacattaaagtgatggttcccactccctcctttcagcctccctgatgaagagttgacaatctcaccgcccaccccctccttatcctgggctcctcccgctcgaccccacttcctttcttctgctccatgtcctgttgatggttacatttgtgtataattatattattattattgttattattattattatatttttaaattcgaattctcgctttagagagagggatgctcttgcccctttcttgcccccaccattttcactgatggggactctctttattgcgggaaaggggggacactttgcacgttgtacacatatgctgcaggaaggagggaggcggtaggccttggagaaggacaggtgccgagccctgcatgtggagccctcccatcccattcccagatagacgtaaagaaccaaaaactacccaacaacaaaacccagatagtggactgaaacccaaagctggcttgacgatgggcttgtgtctcaggggataggaggaggcagtttctgcttctgggctgttcacggctaatacccatcctggtccctccagcttcctgcatacgtatcacactctctgatcctgtgtgttacaccccaagatctgggtgatagaaaggctgcctaggaatctgaggccagggaaggggcttgaggttggaatctctagagataacatggagagagacagctgtagaaagagggctgatgaggacagaaggactgggtgtggtgaattgggaccctacccccagcttttcctttgagatgtacagtgcaatagctccccgtcctttagcctaccccaatcctaaagaaagctggccatgtactgggagatttgggagaggaccttcattgaagtggctccaggatgggccagagtcgtcctttggttccctggggcactgagagcaggaggcttgtcaggggcagggtgaggagggcacctcttggctttgtgcacctgtgtccagaagagtacttactgggcacatggaggctcctgtagatgaggcccgggcccttccccaggcctctgagctcctgcccctgacccacctcccagctctctgcgtgctccttgtctcgctacctcctgtccctccacctccaggccacatcccaaacctgccctcttgctactgtaattgtaaatagagacctttcaaatgttagtggtgtaaccgtccaggaaactgttgtgtttgttgttgttgtattgatatgaaatgagattctatttttgtcaaagtatattgtaataataatgactcaaatggcccgtactgtacagatgagattcttctgctgtgttcttgccttcctctccagactaatgctttgttgcctcctcagtggggctgcagcaagcaccaggggcagtggaagaagcattgggtccttggacctcttgctggatctgaggtcagactggagggaatagtttgccccctccccagcctgctgtcaccacccctgcccttcctctgcttccccacctggggaaaggggatgggagacagcacacactcccttggagttcctcccagctggagggtagagttagacaaggctcagtgttgtagtacgatggtctttgcccacctgtgacccagccttttgtagtattttgacacttgatgcagggaaggagccagaagcagaggggtgtgagcatgctcgtggaggcgtatctgggttcaccctgtatttatgtgtttgtgtgcagctgtgcggatgtacctttgagtgactcaagctccaagggcctctgtgtgagctgggtgtgtttacaagggatcagcgccttccaactctgtggcttcaccccctccccgggctgctctcagtcccaaaacattttactaaagtcatgggggacgggtgctagttggccttcctgtttctccccacagcctacctccaccagggcttcacatttggagctctgcctccatatggctgtccactagccccacccaggcatggttcatccctggagttctgacttgtttatggagccaactcaagttcttcttgcccggagctttgccttttgtaaggcagggaccctcccttaaccagagtttaccccagtagctgaccaagcatggggtgctacccacatgcctcaccttcccactcctcctcacaagtcctggagggagttttaagacttgcttatggccttgaaagaagccagggttgtagccctgtgctccccttgaagtagctggcacattgtaggccctcagtaaatgctgaatgggtggatgacaggtgctcaataaatgtggattcacggcctcatctcaggcccatccttcaaggctgagcttggccaccattacagttgtgggtgaagcccctatagttcacagtgtgctactcaacagtttgccatctgcttcccgaaagcaaacctggcttgtgattgccatgtacggatgcgtgcatgcactgtgtgtgtgtgtgcgtgcgtgtgcgtgtctgtgtctgcacacacacgtatgagttcttgtgtgtctctgtccctgactgaaggggcagtctgtgaatgagtatgtgacatttctgcagtttagtatccccaggtttctcctggggctatgcaggggcttctggctggccaggtaaatggatccctgggaacctagacctcaaatggggacttattttcttcctctcacaagccaaatttgcctactctccactccctatacagaactgggtatttgccaaagtagcctctggcgtcatccagtgcccttcccacccaggttcccctctgctttcagggatagtgggaccgagggccacccccacatgcctcagtttagcacatttcctccatccccagcagtgcatccacccaccctccccaactccaacaggaaggaagaaagaaatgcaccttctcttgctcgttatttatttgtttggagagacagaaatgatggaaaagtatctaaatctatctctctctctatttttacctaactctctggaacccctgtgggggaatgtaggctctcctaagaggctgggagctccttgttctaccctgtctgcctctacataagcagaaggggtgggatgtaatggggcaggagggctgagattcccaaggagaatctgaattctctacccccattcaagtcccagaaagagggaagaagggagggatgggccagccaagagctgacccgtccccaaacttgacaatcacccacactcctggctcctgggtctgggtgagtccaagtgtgtggctgttggtttgttttcattatttctttccgtgctgtacggtgatgctttctagtattctgcacattaagaaaagtcctcgagattcttacgagtttggtttgaaaactctttcactatatttgttgtaaagaggtttactattaaaagaaaaaaaaaaaaacatgtttctgatacctcaaaaaaaaaaaaaaaaaa

SEQ ID NO: 667 - DNA, 5423 bp, Mus musculus
  source 1..5423: mol_type = genomic DNA
tgcgcggtgcctacgtcggcctcgagtctggggctggaggagttgcctttggagcccgaaaggaggaaggaagcaaaatatcaacaaccgtcgaggcggcttgggcgctcggctgcgtgcctgccgcccgccgccgccgcccccgcgcgcaccagggggtcccggccctgtggcgccgcccaggccgcgtggacgcggcgccttcgctgtttcccgtcggagctgcggcttcgcgtaaccgaggattcggcggaccgggccgaggctccgggcgccgtgacaccccgtcccccccacgggctggaggctgtgcataggtgttctgcagaccatgaactgatcactagtccccagacattcatgagcacagtgtgaggctcctgatcaccacccagcagccccttcctctctggcactaaggacccccggagaagatggggaggaaaaagattcagatccagcgaatcactgatgaacggaaccgccaggtgaccttcaccaagcggaagtttggactgatgaagaaggcctacgagctgagtgtgctgtgcgactgcgagatcgcgctcatcatcttcaaccactccaacaagctgttccagtatgccagcaccgacatggacaaggtgctgctcaagtacaccgagtacaacgagccacacgagagccgcaccaatgctgacatcatcgagaccctgaggaagaagggtttcaacggctgtgacagcccagagccggatggggaggactcactggagcagagccccctgctggaggacaagtaccggcgggccagtgaggagctggatgggctcttcaggcgctatgggtcatctgttccggcccccaactttgccatgcctgtcacagtgcccgtgtccaatcagagctccatgcagttcagcaatccaagtagctctctggtcactccttccctggtgacatcatcccttacggacccacggctcctgtccccccagcagccagcactacagagaaacagtgtttctccaggcttgccccagcggcctgctagtgcaggagccatgctgggtggagacctcaacagtgctaatggagcctgccccagccccgttgggaatggctatgtcagtgcccgagcttcccctggcctcctccctgtggccaatggcaacagcctaaacaaagtcatccctgccaagtctccgcccccacccacccacaacacccagcttggagcccccagccgcaagcctgatctgcgggtcatcacttcccagggaggcaaagggttaatgcatcatttgaacaatgcccagcgccttggggtctcccagtctacccactcgctcaccaccccagtggtttccgtggcaacaccaagtttactcagccagggcctccccttctcctccatgcccactgcctacaacacagattaccagctgcccagtgcagagctatcctccttaccagccttcagttcacctgcagggctggcactaggcaatgtcaccgcctggcagcagccccagccgccccagcagccacaaccgccacaaccgccacagtcacagccacagccaccacagccacagccacagcagccacctcagcaacagccccacttggtccccgtttctctcagcaacctcatccctggcagccccttgcctcacgtgggtgctgctctcacagtcactacccacccccacatcagcatcaagtcagaaccagtgtccccaagtcgtgaacgcagccctgcacctcctccaccagctgtgttcccagctgcccgccctgagcctggcgaaggtctcagcagcccagctggaggatcctatgagaccggggaccgggatgatggacggggggactttgggcccacactaggcctgctgcgcccagccccagagcctgaggctgagggctcagctgtgaagaggatgcggctggatacttggacattaaagtgatggttcccactccctcctttcagcctccctgatgaagagttgacaatctcaccgcccaccccctccttatcctgggctcctcccgctcgaccccacttcctttcttctgctccatgtcctgttgatggttacatttgtgtataattatattattattattgttattattattattatatttttaaattcgaattctcgctttagagagagggatgctcttgcccctttcttgcccccaccattttcactgatggggactctctttattgcgggaaaggggggacactttgcacgttgtacacatatgctgcaggaaggagggaggcggtaggccttggagaaggacaggtgccgagccctgcatgtggagccctcccatcccattcccagatagacgtaaagaaccaaaaactacccaacaacaaaacccagatagtggactgaaacccaaagctggcttgacgatgggcttgtgtctcaggggataggaggaggcagtttctgcttctgggctgttcacggctaatacccatcctggtccctccagcttcctgcatacgtatcacactctctgatcctgtgtgttacaccccaagatctgggtgatagaaaggctgcctaggaatctgaggccagggaaggggcttgaggttggaatctctagagataacatggagagagacagctgtagaaagagggctgatgaggacagaaggactgggtgtggtgaattgggaccctacccccagcttttcctttgagatgtacagtgcaatagctccccgtcctttagcctaccccaatcctaaagaaagctggccatgtactgggagatttgggagaggaccttcattgaagtggctccaggatgggccagagtcgtcctttggttccctggggcactgagagcaggaggcttgtcaggggcagggtgaggagggcacctcttggctttgtgcacctgtgtccagaagagtacttactgggcacatggaggctcctgtagatgaggcccgggcccttccccaggcctctgagctcctgcccctgacccacctcccagctctctgcgtgctccttgtctcgctacctcctgtccctccacctccaggccacatcccaaacctgccctcttgctactgtaattgtaaatagagacctttcaaatgttagtggtgtaaccgtccaggaaactgttgtgtttgttgttgttgtattgatatgaaatgagattctatttttgtcaaagtatattgtaataataatgactcaaatggcccgtactgtacagatgagattcttctgctgtgttcttgccttcctctccagactaatgctttgttgcctcctcagtggggctgcagcaagcaccaggggcagtggaagaagcattgggtccttggacctcttgctggatctgaggtcagactggagggaatagtttgccccctccccagcctgctgtcaccacccctgcccttcctctgcttccccacctggggaaaggggatgggagacagcacacactcccttggagttcctcccagctggagggtagagttagacaaggctcagtgttgtagtacgatggtctttgcccacctgtgacccagccttttgtagtattttgacacttgatgcagggaaggagccagaagcagaggggtgtgagcatgctcgtggaggcgtatctgggttcaccctgtatttatgtgtttgtgtgcagctgtgcggatgtacctttgagtgactcaagctccaagggcctctgtgtgagctgggtgtgtttacaagggatcagcgccttccaactctgtggcttcaccccctccccgggctgctctcagtcccaaaacattttactaaagtcatgggggacgggtgctagttggccttcctgtttctccccacagcctacctccaccagggcttcacatttggagctctgcctccatatggctgtccactagccccacccaggcatggttcatccctggagttctgacttgtttatggagccaactcaagttcttcttgcccggagctttgccttttgtaaggcagggaccctcccttaaccagagtttaccccagtagctgaccaagcatggggtgctacccacatgcctcaccttcccactcctcctcacaagtcctggagggagttttaagacttgcttatggccttgaaagaagccagggttgtagccctgtgctccccttgaagtagctggcacattgtaggccctcagtaaatgctgaatgggtggatgacaggtgctcaataaatgtggattcacggcctcatctcaggcccatccttcaaggctgagcttggccaccattacagttgtgggtgaagcccctatagttcacagtgtgctactcaacagtttgccatctgcttcccgaaagcaaacctggcttgtgattgccatgtacggatgcgtgcatgcactgtgtgtgtgtgtgcgtgcgtgtgcgtgtctgtgtctgcacacacacgtatgagttcttgtgtgtctctgtccctgactgaaggggcagtctgtgaatgagtatgtgacatttctgcagtttagtatccccaggtttctcctggggctatgcaggggcttctggctggccaggtaaatggatccctgggaacctagacctcaaatggggacttattttcttcctctcacaagccaaatttgcctactctccactccctatacagaactgggtatttgccaaagtagcctctggcgtcatccagtgcccttcccacccaggttcccctctgctttcagggatagtgggaccgagggccacccccacatgcctcagtttagcacatttcctccatccccagcagtgcatccacccaccctccccaactccaacaggaaggaagaaagaaatgcaccttctcttgctcgttatttatttgtttggagagacagaaatgatggaaaagtatctaaatctatctctctctctatttttacctaactctctggaacccctgtgggggaatgtaggctctcctaagaggctgggagctccttgttctaccctgtctgcctctacataagcagaaggggtgggatgtaatggggcaggagggctgagattcccaaggagaatctgaattctctacccccattcaagtcccagaaagagggaagaagggagggatgggccagccaagagctgacccgtccccaaacttgacaatcacccacactcctggctcctgggtctgggtgagtccaagtgtgtggctgttggtttgttttcattatttctttccgtgctgtacggtgatgctttctagtattctgcacattaagaaaagtcctcgagattcttacgagtttggtttgaaaactctttcactatatttgttgtaaagaggtttactattaaaagaaaaaaaaaaaaacatgtttctgatacctcaaaaaaaaaaaaaaaaaa

SEQ ID NO: 668 - DNA, 19 bp, synthetic construct
  misc_feature 1..19: note = Synthetic
  source 1..19: mol_type = other DNA
ttcagatccagcgaatcac

SEQ ID NO: 669 - DNA, 19 bp, synthetic construct
  misc_feature 1..19: note = Synthetic
  source 1..19: mol_type = other DNA
acaaggtgctgctcaagta

SEQ ID NO: 670 - DNA, 19 bp, synthetic construct
  misc_feature 1..19: note = Synthetic
  source 1..19: mol_type = other DNA
cctacaacacagattacca

SEQ ID NO: 671 - DNA, 19 bp, synthetic construct
  misc_feature 1..19: note = Synthetic
  source 1..19: mol_type = other DNA
atgaagagttgacaatctc

SEQ ID NO: 672 - DNA, 19 bp, synthetic construct
  misc_feature 1..19: note = Synthetic
  source 1..19: mol_type = other DNA
acactttgcacgttgtaca

SEQ ID NO: 673 - DNA, 19 bp, synthetic construct
  misc_feature 1..19: note = Synthetic
  source 1..19: mol_type = other DNA
acgttgtacacatatgctg

SEQ ID NO: 674 - DNA, 19 bp, synthetic construct
  misc_feature 1..19: note = Synthetic
  source 1..19: mol_type = other DNA
gccgagccctgcatgtgga

SEQ ID NO: 675 - DNA, 19 bp, synthetic construct
  misc_feature 1..19: note = Synthetic
  source 1..19: mol_type = other DNA
atattgtaataataatgac

SEQ ID NO: 676 - DNA, 19 bp, synthetic construct
  misc_feature 1..19: note = Synthetic
  source 1..19: mol_type = other DNA
attgtaataataatgactc

SEQ ID NO: 677 - DNA, 19 bp, synthetic construct
  misc_feature 1..19: note = Synthetic
  source 1..19: mol_type = other DNA
tattgatatgaaatgagat

SEQ ID NO: 678 - DNA, 19 bp, synthetic construct
  misc_feature 1..19: note = Synthetic
  source 1..19: mol_type = other DNA
tgtcaaagtatattgtaat

SEQ ID NO: 679 - DNA, 19 bp, synthetic construct
  misc_feature 1..19: note = Synthetic
  source 1..19: mol_type = other DNA
ttgtcaaagtatattgtaa

SEQ ID NO: 680 - DNA, 19 bp, synthetic construct
  misc_feature 1..19: note = Synthetic
  source 1..19: mol_type = other DNA
tgttgttgtattgatatga

SEQ ID NO: 681 - DNA, 19 bp, synthetic construct
  misc_feature 1..19: note = Synthetic
  source 1..19: mol_type = other DNA
gcaacagcctaaacaaggt

SEQ ID NO: 682 - DNA, 19 bp, synthetic construct
  misc_feature 1..19: note = Synthetic
  source 1..19: mol_type = other DNA
aacacagattaccagttga

SEQ ID NO: 683 - DNA, 19 bp, synthetic construct
  misc_feature 1..19: note = Synthetic
  source 1..19: mol_type = other DNA
tgggcttgatgggtgggtt

SEQ ID NO: 684 - DNA, 19 bp, synthetic construct
  misc_feature 1..19: note = Synthetic
  source 1..19: mol_type = other DNA
ctaagatatacagtgcaat

SEQ ID NO: 685 - DNA, 19 bp, synthetic construct
  misc_feature 1..19: note = Synthetic
  source 1..19: mol_type = other DNA
gatatacagtgcaatagct

SEQ ID NO: 686 - DNA, 19 bp, synthetic construct
  misc_feature 1..19: note = Synthetic
  source 1..19: mol_type = other DNA
agagggtcttcagtgaggt

SEQ ID NO: 687 - DNA, 19 bp, synthetic construct
  misc_feature 1..19: note = Synthetic
  source 1..19: mol_type = other DNA
ccgacatggacaaggtgct

SEQ ID NO: 688 - DNA, 19 bp, synthetic construct
  misc_feature 1..19: note = Synthetic
  source 1..19: mol_type = other DNA
atgcagttcagcaatccaa

SEQ ID NO: 689 - DNA, 19 bp, synthetic construct
  misc_feature 1..19: note = Synthetic
  source 1..19: mol_type = other DNA
cagcaatccaagtagctct

SEQ ID NO: 690 - DNA, 19 bp, synthetic construct
  misc_feature 1..19: note = Synthetic
  source 1..19: mol_type = other DNA
gcaacaccaagtttactca

SEQ ID NO: 691 - DNA, 19 bp, synthetic construct
  misc_feature 1..19: note = Synthetic
  source 1..19: mol_type = other DNA
gctggatacttggacatta

SEQ ID NO: 692 - RNA, 21 nt, synthetic construct
  misc_feature 1..21: note = Synthetic
  source 1..21: mol_type = other RNA
gattcagatccagcgaatcac

SEQ ID NO: 693 - RNA, 21 nt, synthetic construct
  misc_feature 1..21: note = Synthetic
  source 1..21: mol_type = other RNA
ggacaaggtgctgctcaagta

SEQ ID NO: 694 - RNA, 21 nt, synthetic construct
  misc_feature 1..21: note = Synthetic
  source 1..21: mol_type = other RNA
tgcctacaacacagattacca

SEQ ID NO: 695 - RNA, 21 nt, synthetic construct
  misc_feature 1..21: note = Synthetic
  source 1..21: mol_type = other RNA
tgatgaagagttgacaatctc

SEQ ID NO: 696 - RNA, 21 nt, synthetic construct
  misc_feature 1..21: note = Synthetic
  source 1..21: mol_type = other RNA
ggacactttgcacgttgtaca

SEQ ID NO: 697 - RNA, 21 nt, synthetic construct
  misc_feature 1..21: note = Synthetic
  source 1..21: mol_type = other RNA
gcacgttgtacacatatgctg

SEQ ID NO: 698 - RNA, 21 nt, synthetic construct
  misc_feature 1..21: note = Synthetic
  source 1..21: mol_type = other RNA
gtgccgagccctgcatgtgga

SEQ ID NO: 699 - RNA, 21 nt, synthetic construct
  misc_feature 1..21: note = Synthetic
  source 1..21: mol_type = other RNA
gtatattgtaataataatgac

SEQ ID NO: 700 - RNA, 21 nt, synthetic construct
  misc_feature 1..21: note = Synthetic
  source 1..21: mol_type = other RNA
atattgtaataataatgactc

SEQ ID NO: 701 - RNA, 21 nt, synthetic construct
  misc_feature 1..21: note = Synthetic
  source 1..21: mol_type = other RNA
tgtattgatatgaaatgagat

SEQ ID NO: 702 - RNA, 21 nt, synthetic construct
  misc_feature 1..21: note = Synthetic
  source 1..21: mol_type = other RNA
tttgtcaaagtatattgtaat

SEQ ID NO: 703 - RNA, 21 nt, synthetic construct
  misc_feature 1..21: note = Synthetic
  source 1..21: mol_type = other RNA
ttttgtcaaagtatattgtaa

SEQ ID NO: 704 - RNA, 21 nt, synthetic construct
  misc_feature 1..21: note = Synthetic
  source 1..21: mol_type = other RNA
gttgttgttgtattgatatga

SEQ ID NO: 705 - RNA, 21 nt, synthetic construct
  misc_feature 1..21: note = Synthetic
  source 1..21: mol_type = other RNA
tggcaacagcctaaacaaggt

SEQ ID NO: 706 - RNA, 21 nt, synthetic construct
  misc_feature 1..21: note = Synthetic
  source 1..21: mol_type = other RNA
acaacacagattaccagttga

SEQ ID NO: 707 - RNA, 21 nt, synthetic construct
  misc_feature 1..21: note = Synthetic
  source 1..21: mol_type = other RNA
agtgggcttgatgggtgggtt

SEQ ID NO: 708 - RNA, 21 nt, synthetic construct
  misc_feature 1..21: note = Synthetic
  source 1..21: mol_type = other RNA
ctctaagatatacagtgcaat

SEQ ID NO: 709 - RNA, 21 nt, synthetic construct
  misc_feature 1..21: note = Synthetic
  source 1..21: mol_type = other RNA
aagatatacagtgcaatagct

SEQ ID NO: 710 - RNA, 21 nt, synthetic construct
  misc_feature 1..21: note = Synthetic
  source 1..21: mol_type = other RNA
ggagagggtcttcagtgaggt

SEQ ID NO: 711 - RNA, 21 nt, synthetic construct
  misc_feature 1..21: note = Synthetic
  source 1..21: mol_type = other RNA
caccgacatggacaaggtgct

SEQ ID NO: 712 - RNA, 21 nt, synthetic construct
  misc_feature 1..21: note = Synthetic
  source 1..21: mol_type = other RNA
ccatgcagttcagcaatccaa

SEQ ID NO: 713 - RNA, 21 nt, synthetic construct
  misc_feature 1..21: note = Synthetic
  source 1..21: mol_type = other RNA
ttcagcaatccaagtagctct

SEQ ID NO: 714 - RNA, 21 nt, synthetic construct
  misc_feature 1..21: note = Synthetic
  source 1..21: mol_type = other RNA
tggcaacaccaagtttactca

SEQ ID NO: 715 - RNA, 21 nt, synthetic construct
  misc_feature 1..21: note = Synthetic
  source 1..21: mol_type = other RNA
cggctggatacttggacatta

SEQ ID NO: 716 - RNA, 23 nt, synthetic construct
  misc_feature 1..23: note = Synthetic
  source 1..23: mol_type = other RNA
gtgattcgctggatctgaatctt

SEQ ID NO: 717 - RNA, 23 nt, synthetic construct
  misc_feature 1..23: note = Synthetic
  source 1..23: mol_type = other RNA
tacttgagcagcaccttgtccat

SEQ ID NO: 718 - RNA, 23 nt, synthetic construct
  misc_feature 1..23: note = Synthetic
  source 1..23: mol_type = other RNA
tggtaatctgtgttgtaggcagt

SEQ ID NO: 719 - RNA, 23 nt, synthetic construct
  misc_feature 1..23: note = Synthetic
  source 1..23: mol_type = other RNA
gagattgtcaactcttcatcagg

SEQ ID NO: 720 - RNA, 23 nt, synthetic construct
  misc_feature 1..23: note = Synthetic
  source 1..23: mol_type = other RNA
tgtacaacgtgcaaagtgtcccc

SEQ ID NO: 721 - RNA, 23 nt, synthetic construct
  misc_feature 1..23: note = Synthetic
  source 1..23: mol_type = other RNA
cagcatatgtgtacaacgtgcaa

SEQ ID NO: 722 - RNA, 23 nt, synthetic construct
  misc_feature 1..23: note = Synthetic
  source 1..23: mol_type = other RNA
tccacatgcagggctcggcacct

SEQ ID NO: 723 - RNA, 23 nt, synthetic construct
  misc_feature 1..23: note = Synthetic
  source 1..23: mol_type = other RNA
gtcattattattacaatatactt

SEQ ID NO: 724 - RNA, 23 nt, synthetic construct
  misc_feature 1..23: note = Synthetic
  source 1..23: mol_type = other RNA
gagtcattattattacaatatac

SEQ ID NO: 725 - RNA, 23 nt, synthetic construct
  misc_feature 1..23: note = Synthetic
  source 1..23: mol_type = other RNA
atctcatttcatatcaatacaac

SEQ ID NO: 726 - RNA, 23 nt, synthetic construct
  misc_feature 1..23: note = Synthetic
  source 1..23: mol_type = other RNA
attacaatatactttgacaaaaa

SEQ ID NO: 727 - RNA, 23 nt, synthetic construct
  misc_feature 1..23: note = Synthetic
  source 1..23: mol_type = other RNA
ttacaatatactttgacaaaaat

SEQ ID NO: 728 - RNA, 23 nt, synthetic construct
  misc_feature 1..23: note = Synthetic
  source 1..23: mol_type = other RNA
tcatatcaatacaacaacaacaa

SEQ ID NO: 729 - RNA, 23 nt, synthetic construct
  misc_feature 1..23: note = Synthetic
  source 1..23: mol_type = other RNA
accttgtttaggctgttgccatt

SEQ ID NO: 730 - RNA, 23 nt, synthetic construct
  misc_feature 1..23: note = Synthetic
  source 1..23: mol_type = other RNA
tcaactggtaatctgtgttgtag

SEQ ID NO: 731 - RNA, 23 nt, synthetic construct
  misc_feature 1..23: note = Synthetic
  source 1..23: mol_type = other RNA
aacccacccatcaagcccacttt

SEQ ID NO: 732 - RNA, 23 nt, synthetic construct
  misc_feature 1..23: note = Synthetic
  source 1..23: mol_type = other RNA
attgcactgtatatcttagagaa

SEQ ID NO: 733 - RNA, 23 nt, synthetic construct
  misc_feature 1..23: note = Synthetic
  source 1..23: mol_type = other RNA
agctattgcactgtatatcttag

SEQ ID NO: 734 - RNA, 23 nt, synthetic construct
  misc_feature 1..23: note = Synthetic
  source 1..23: mol_type = other RNA
acctcactgaagaccctctcccc

SEQ ID NO: 735 - RNA, 23 nt, synthetic construct
  misc_feature 1..23: note = Synthetic
  source 1..23: mol_type = other RNA
agcaccttgtccatgtcggtgct

SEQ ID NO: 736 - RNA, 23 nt, synthetic construct
  misc_feature 1..23: note = Synthetic
  source 1..23: mol_type = other RNA
ttggattgctgaactgcatggag

SEQ ID NO: 737 - RNA, 23 nt, synthetic construct
  misc_feature 1..23: note = Synthetic
  source 1..23: mol_type = other RNA
agagctacttggattgctgaact

SEQ ID NO: 738 - RNA, 23 nt, synthetic construct
  misc_feature 1..23: note = Synthetic
  source 1..23: mol_type = other RNA
tgagtaaacttggtgttgccacg

SEQ ID NO: 739 - RNA, 23 nt, synthetic construct
  misc_feature 1..23: note = Synthetic
  source 1..23: mol_type = other RNA
taatgtccaagtatccagccgca

SEQ ID NO: 740 - DNA, 2540 bp, Homo sapiens
  source 1..2540: mol_type = genomic DNA
agtgctccgccgcagcgacccgcgggccggcgggcgatcgagccagcgcaggacccgcggctcggcccccggccgccgccggaccgagagtctagccgccgcccccagcccagcccgcccggccgcaggaccgccggggcctggccgccggtccggcgtgcgccaagttcagccgccaccggcacggccaggccagcatggtggaccacttacttccagtggacgagaacttctcgtcgccaaaatgcccagttgggtatctgggtgataggctggttggccggcgggcatatcacatgctgccctcacccgtctctgaagatgacagcgatgcctccagcccctgctcctgttccagtcccgactctcaagccctctgctcctgctatggtggaggcctgggcaccgagagccaggacagcatcttggacttcctattgtcccaggccacgctgggcagtggcgggggcagcggcagtagcattggggccagcagtggccccgtggcctgggggccctggcgaagggcagcggcccctgtgaagggggagcatttctgcttgcccgagtttcctttgggtgatcctgatgacgtcccacggcccttccagcctaccctggaggagattgaagagtttctggaggagaacatggagcctggagtcaaggaggtccctgagggcaacagcaaggacttggatgcctgcagccagctctcagctgggccacacaagagccacctccatcctgggtccagcgggagagagcgctgttcccctccaccaggtggtgccagtgcaggaggtgcccagggcccaggtgggggccccacgcctgatggccccatcccagtgttgctgcagatccagcccgtgcctgtgaagcaggaatcgggcacagggcctgcctcccctgggcaagccccagagaatgtcaaggttgcccagctcctggtcaacatccaggggcagaccttcgcactcgtgccccaggtggtaccctcctccaacttgaacctgccctccaagtttgtgcgcattgcccctgtgcccattgccgccaagcctgttggatcgggacccctggggcctggccctgccggtctcctcatgggccagaagttccccaagaacccagccgcagaactcatcaaaatgcacaaatgtactttccctggctgcagcaagatgtacaccaaaagcagccacctcaaggcccacctgcgccggcacacgggtgagaagcccttcgcctgcacctggccaggctgcggctggaggttctcgcgctctgacgagctgtcgcggcacaggcgctcgcactcaggtgtgaagccgtaccagtgtcctgtgtgcgagaagaagttcgcgcggagcgaccacctctccaagcacatcaaggtgcaccgcttcccgcggagcagccgctccgtgcgctccgtgaactgaaagcgccctgaaccccagcctgtccgtcaccccggatccccaccccatccccatttttttaagcaataatttatttgcctcctccagagggacatggcaatgttaccagcccaccttctgaagcctgggaggtgtgaacccagggcccgccaaccgctgcctttctcgggagtacttagagcctcgaacccgcgtccctgggggctgggccccaggcgcacggggctggaggcaggccttcgtgccttcgtgccttcgtgccttcccgcggtggccaggcctctgctgcagccgctggttgcaggcagagttttggggacctggcccttctcccactgggctcccccatcctgggccaaggccagaactttagtgctaggggaagatgaaatgtgcagttttgaaatgttgggtttccagagagagtcatgctggaggagaaggaagtaggccagaagtccagggctgcactgtggtgtgagggtggctttgtctaagatgcctgctcagcatgatcaccagagggtgtgggcaggtccctggagccgggggggggggggggggggggggggggcaggaccgggccgctgggccctcatgtgggagagaggtgaaaagcgtcccccactagggggctggcagtgcatgtgcttgagttaaatgtgcagggcagacagagccagaagggcctgtacccaggggctcgtcccctcctccggtttcccagacaaatccagacaccagcctttagggtggccttgggaggagagggccaggctgtcctgggtgtgagagaactagatagagcctcccaaccctgatttagaaatgcattccttattttgtctagaaattaataaatgaactagcttgttttgacaggtttatttcacatcctatgaatgtatgtaaataaactgtacataggtccatccacataaaatatcttttaataacatatcaacatttgtgtaaatttgaaatttaaaaaaatctatgaagctggtgtacatatgttacaattacgtatattttctttggtccttcataaaaatatatttactttgccaataaaaagaaaaagaactcaca

SEQ ID NO: 741 - DNA, 2373 bp, synthetic construct
  misc_feature 1..2373: note = Synthetic
  source 1..2373: mol_type = other DNA
gtgagcggccggagagcggggagagcggcgagcggcgagcgcccagctcggccgcagggagtgcgggctgcggccaggagcgctggacgcgcggccgcatacggagccgggccgcacgcgcgaggccgcgccaggcgacgcggagtccagtcaccacaggctcggccaggccagcatggtggaccacctgcttccagtggacgagaccttctcgtcaccgaaatgctcagtgggttacctaggggacaggctggccagccggcagccataccacatgttgccctcgcccatctcggaggatgacagcgatgtctccagcccctgctcttgtgccagccctgactcgcaagccttctgttcctgctacagtgcgggtccaggccctgaggcccagggcagcatcttggatttcctcctgtcccgggccacactgggcagtggtggtggcagtggaggtattggagatagcagtggccctgtgacctggggatcatggaggagagcctctgtgcctgtgaaggaggaacatttctgcttccctgaatttctgtcaggggacactgatgacgtctccaggcccttccagcctaccctggaggagattgaagaattcctggaagagaacatggaggctgaggtcaaggaggccccagagaacggtagcagggacctggagacctgtagccagctctcagctgggtcacaccggagccaccttcatccagagtctgctgggagagagcgctgtaccccaccaccaggtggcacgagtgggggtggtgcccaaagtgcaggtgaggggccagcacatgatggccccgtgccggtgctactgcagatccagcctgttgctgtgaagcaggaggcaggtacagggccagcctccccagggcaggccccagagagcgtcaaggtcgcccagcttctagtcaacatccaggggcagacctttgcactcctgcctcaagtggtaccatcctccaacttgaacctgccctcaaagtttgtgcgaattgcgcctgtgcccattgccgccaaacctattggctcaggatccctagggcccggccctgctggcctccttgtgggccagaagtttcccaagaacccagcagcagaacttctcaaaatgcacaaatgcactttcccaggctgcagcaagatgtacaccaagagcagccacctcaaggcccacctgcgtcggcacacaggcgagaagccctttgcctgcacctggccaggctgcggctggaggttttcccgctcagatgagttgtcaaggcaccggcgatctcactcgggtgtgaagccgtaccagtgtcccgtgtgcgagaagaaattcgcgcggagtgaccacctctccaaacacatcaaagtgcatcgcttcccacgaagcagccgcgcagtacgcgccatcaactgagcgcagtggccgcccttccctcccccagctccacgttttgtttttaaatgcaataacttattgcctcttttcagaaggatgtgacaatattaccagccccctcccccttctgaatcttaggaggtatgacccagagccaccatggctgcctttctggggaagacctagagtccctatggtccctgggggctggttccccggtggcccaggtggcccaggcaggcctgtgcccttgtgcctttgtgccttcctgccagctggaagcagtgtttggggggcccttgccctcttcccactgggctccctacctgggccaaagtcaacatcattgctggggaagaagtgttttggctgtgtcaaaatagtagctcccagaggaagcaagccatgctgggaaaaaggaagtgggtcaaaaaagcgtagggctgcactgtgatgtgaggaccgccatatgcaagaggcctttgagggtccaggaggatggccaccctcgctctaggccgtaatgcatgtgcttaaatgcaagacaaatggagccatagccagccgtacccagcctggctcaccctcctccagacaccagacaccagcctcctggttgtggtgagaggagaagggaacaggtctggtggatgccaagcaactagttagtgcctcccagtctgacctagatttgcattcctcatcaggactagaaattagtaccaattgaactagcttgttttgacaggtctatttcacatcctatgaatgtatgtaaataaactgtacataggtacgcatctacataaaatatcttttaataacacgttgacatttgtgtaaatttgaaatttaaaaaaattctataaagttggtgtacatatgttacaattatgtatattttctttggtccttcataaaaaatatatttactttgccaataaaaagaggaaaaaaaaaaagaactc

SEQ ID NO: 742 - DNA, 19 bp, Mus musculus
  source 1..19: mol_type = genomic DNA
gcagcaagatgtacaccaa

SEQ ID NO: 743 - DNA, 19 bp, synthetic construct
  misc_feature 1..19: note = Synthetic
  source 1..19: mol_type = other DNA
aatgtatgtaaataaactg

SEQ ID NO: 744 - DNA, 19 bp, synthetic construct
  misc_feature 1..19: note = Synthetic
  source 1..19: mol_type = other DNA
tgtatgtaaataaactgta

SEQ ID NO: 745 - DNA, 19 bp, synthetic construct
  misc_feature 1..19: note = Synthetic
  source 1..19: mol_type = other DNA
tatgtaaataaactgtaca

SEQ ID NO: 746 - DNA, 19 bp, synthetic construct
  misc_feature 1..19: note = Synthetic
  source 1..19: mol_type = other DNA
taaataaactgtacatagg

SEQ ID NO: 747 - DNA, 19 bp, synthetic construct
  misc_feature 1..19: note = Synthetic
  source 1..19: mol_type = other DNA
tatattttctttggtcctt

SEQ ID NO: 748 - DNA, 19 bp, synthetic construct
  misc_feature 1..19: note = Synthetic
  source 1..19: mol_type = other DNA
tatatttactttgccaata

SEQ ID NO: 749 - DNA, 19 bp, synthetic construct
  misc_feature 1..19: note = Synthetic
  source 1..19: mol_type = other DNA
ccaaaatgcccagttgggt

SEQ ID NO: 750 - DNA, 19 bp, synthetic construct
  misc_feature 1..19: note = Synthetic
  source 1..19: mol_type = other DNA
tggaggagattgaagagtt

SEQ ID NO: 751 - DNA, 19 bp, synthetic construct
  misc_feature 1..19: note = Synthetic
  source 1..19: mol_type = other DNA
gcaataatttatttgcctc

SEQ ID NO: 752 - DNA, 19 bp, synthetic construct
  misc_feature 1..19: note = Synthetic
  source 1..19: mol_type = other DNA
catccacataaaatatctt

SEQ ID NO: 753 - DNA, 19 bp, synthetic construct
  misc_feature 1..19: note = Synthetic
  source 1..19: mol_type = other DNA
gcaaggacttggatgcctg

SEQ ID NO: 754 - DNA, 19 bp, synthetic construct
  misc_feature 1..19: note = Synthetic
  source 1..19: mol_type = other DNA
ccagtgtcctgtgtgcgag

SEQ ID NO: 755 - DNA, 19 bp, synthetic construct
  misc_feature 1..19: note = Synthetic
  source 1..19: mol_type = other DNA
cgggagtacttagagcctc

SEQ ID NO: 756 - DNA, 19 bp, synthetic construct
  misc_feature 1..19: note = Synthetic
  source 1..19: mol_type = other DNA
ggtttatttcacatcctat

SEQ ID NO: 757 - DNA, 19 bp, synthetic construct
  misc_feature 1..19: note = Synthetic
  source 1..19: mol_type = other DNA
tctgaatcttaggaggtat

SEQ ID NO: 758 - DNA, 19 bp, synthetic construct
  misc_feature 1..19: note = Synthetic
  source 1..19: mol_type = other DNA
catctacataaaatatctt

SEQ ID NO: 759 - DNA, 19 bp, synthetic construct
  misc_feature 1..19: note = Synthetic
  source 1..19: mol_type = other DNA
aagatgtacaccaagagca

SEQ ID NO: 760 - DNA, 19 bp, synthetic construct
  misc_feature 1..19: note = Synthetic
  source 1..19: mol_type = other DNA
ctcaaagtttgtgcgaatt

SEQ ID NO: 761 - DNA, 19 bp, synthetic construct
  misc_feature 1..19: note = Synthetic
  source 1..19: mol_type = other DNA
gaaattagtaccaattgaa

SEQ ID NO: 762 - DNA, 19 bp, synthetic construct
  misc_feature 1..19: note = Synthetic
  source 1..19: mol_type = other DNA
agggcagcatcttggattt

SEQ ID NO: 763 - DNA, 19 bp, synthetic construct
  misc_feature 1..19: note = Synthetic
  source 1..19: mol_type = other DNA
acgttgacatttgtgtaaa

SEQ ID NO: 764 - DNA, 19 bp, synthetic construct
  misc_feature 1..19: note = Synthetic
  source 1..19: mol_type = other DNA
aattagtaccaattgaact

SEQ ID NO: 765 - DNA, 19 bp, synthetic construct
  misc_feature 1..19: note = Synthetic
  source 1..19: mol_type = other DNA
cagccataccacatgttgc

SEQ ID NO: 766 - RNA, 21 nt, synthetic construct
  misc_feature 1..21: note = Synthetic
  source 1..21: mol_type = other RNA
ctgcagcaagatgtacaccaa

SEQ ID NO: 767 - RNA, 21 nt, synthetic construct
  misc_feature 1..21: note = Synthetic
  source 1..21: mol_type = other RNA
tgaatgtatgtaaataaactg

SEQ ID NO: 768 - RNA, 21 nt, synthetic construct
  misc_feature 1..21: note = Synthetic
  source 1..21: mol_type = other RNA
aatgtatgtaaataaactgta

SEQ ID NO: 769 - RNA, 21 nt, synthetic construct
  misc_feature 1..21: note = Synthetic
  source 1..21: mol_type = other RNA
tgtatgtaaataaactgtaca

SEQ ID NO: 770 - RNA, 21 nt, synthetic construct
  misc_feature 1..21: note = Synthetic
  source 1..21: mol_type = other RNA
tgtaaataaactgtacatagg

SEQ ID NO: 771 - RNA, 21 nt, synthetic construct
  misc_feature 1..21: note = Synthetic
  source 1..21: mol_type = other RNA
cgtatattttctttggtcctt

SEQ ID NO: 772 - RNA, 21 nt, synthetic construct
  misc_feature 1..21: note = Synthetic
  source 1..21: mol_type = other RNA
aatatatttactttgccaata

SEQ ID NO: 773 - RNA, 21 nt, synthetic construct
  misc_feature 1..21: note = Synthetic
  source 1..21: mol_type = other RNA
cgccaaaatgcccagttgggt

SEQ ID NO: 774 - RNA, 21 nt, synthetic construct
  misc_feature 1..21: note = Synthetic
  source 1..21: mol_type = other RNA
cctggaggagattgaagagtt

SEQ ID NO: 775 - RNA, 21 nt, synthetic construct
  misc_feature 1..21: note = Synthetic
  source 1..21: mol_type = other RNA
aagcaataatttatttgcctc

SEQ ID NO: 776 - RNA, 21 nt, synthetic construct
  misc_feature 1..21: note = Synthetic
  source 1..21: mol_type = other RNA
tccatccacataaaatatctt

SEQ ID NO: 777 - RNA, 21 nt, synthetic construct
  misc_feature 1..21: note = Synthetic
  source 1..21: mol_type = other RNA
cagcaaggacttggatgcctg

SEQ ID NO: 778 - RNA, 21 nt, synthetic construct
  misc_feature 1..21: note = Synthetic
  source 1..21: mol_type = other RNA
taccagtgtcctgtgtgcgag

SEQ ID NO: 779 - RNA, 21 nt, synthetic construct
  misc_feature 1..21: note = Synthetic
  source 1..21: mol_type = other RNA
ctcgggagtacttagagcctc

SEQ ID NO: 780 - RNA, 21 nt, synthetic construct
  misc_feature 1..21: note = Synthetic
  source 1..21: mol_type = other RNA
caggtttatttcacatcctat

SEQ ID NO: 781 - RNA, 21 nt, synthetic construct
  misc_feature 1..21: note = Synthetic
  source 1..21: mol_type = other RNA
cttctgaatcttaggaggtat

SEQ ID NO: 782 - RNA, 21 nt, synthetic construct
  misc_feature 1..21: note = Synthetic
  source 1..21: mol_type = other RNA
cgcatctacataaaatatctt

SEQ ID NO: 783 - RNA, 21 nt, synthetic construct
  misc_feature 1..21: note = Synthetic
  source 1..21: mol_type = other RNA
gcaagatgtacaccaagagca

SEQ ID NO: 784 - RNA, 21 nt, synthetic construct
  misc_feature 1..21: note = Synthetic
  source 1..21: mol_type = other RNA
ccctcaaagtttgtgcgaatt

SEQ ID NO: 785 - RNA, 21 nt, synthetic construct
  misc_feature 1..21: note = Synthetic
  source 1..21: mol_type = other RNA
tagaaattagtaccaattgaa

SEQ ID NO: 786 - RNA, 21 nt, synthetic construct
  misc_feature 1..21: note = Synthetic
  source 1..21: mol_type = other RNA
ccagggcagcatcttggattt

SEQ ID NO: 787 - RNA, 21 nt, synthetic construct
  misc_feature 1..21: note = Synthetic
  source 1..21: mol_type = other RNA
acacgttgacatttgtgtaaa

SEQ ID NO: 788 - RNA, 21 nt, synthetic construct
  misc_feature 1..21: note = Synthetic
  source 1..21: mol_type = other RNA
gaaattagtaccaattgaact

SEQ ID NO: 789 - RNA, 21 nt, synthetic construct
  misc_feature 1..21: note = Synthetic
  source 1..21: mol_type = other RNA
ggcagccataccacatgttgc

SEQ ID NO: 790 - RNA, 23 nt, synthetic construct
  misc_feature 1..23: note = Synthetic
  source 1..23: mol_type = other RNA
ttggtgtacatcttgctgcagcc

SEQ ID NO: 791 - RNA, 23 nt, synthetic construct
  misc_feature 1..23: note = Synthetic
  source 1..23: mol_type = other RNA
cagtttatttacatacattcata

SEQ ID NO: 792 - RNA, 23 nt, synthetic construct
  misc_feature 1..23: note = Synthetic
  source 1..23: mol_type = other RNA
tacagtttatttacatacattca

SEQ ID NO: 793 - RNA, 23 nt, synthetic construct
  misc_feature 1..23: note = Synthetic
  source 1..23: mol_type = other RNA
tgtacagtttatttacatacatt

SEQ ID NO: 794 - RNA, 23 nt, synthetic construct
  misc_feature 1..23: note = Synthetic
  source 1..23: mol_type = other RNA
cctatgtacagtttatttacata

SEQ ID NO: 795 - RNA, 23 nt, synthetic construct
  misc_feature 1..23: note = Synthetic
  source 1..23: mol_type = other RNA
aaggaccaaagaaaatatacgta

SEQ ID NO: 796 - RNA, 23 nt, synthetic construct
  misc_feature 1..23: note = Synthetic
  source 1..23: mol_type = other RNA
tattggcaaagtaaatatatttt

SEQ ID NO: 797 - RNA, 23 nt, synthetic construct
  misc_feature 1..23: note = Synthetic
  source 1..23: mol_type = other RNA
acccaactgggcattttggcgac

SEQ ID NO: 798 - RNA, 23 nt, synthetic construct
  misc_feature 1..23: note = Synthetic
  source 1..23: mol_type = other RNA
aactcttcaatctcctccagggt

SEQ ID NO: 799 - RNA, 23 nt, synthetic construct
  misc_feature 1..23: note = Synthetic
  source 1..23: mol_type = other RNA
gaggcaaataaattattgcttaa

SEQ ID NO: 800 - RNA, 23 nt, synthetic construct
  misc_feature 1..23: note = Synthetic
  source 1..23: mol_type = other RNA
aagatattttatgtggatggacc

SEQ ID NO: 801 - RNA, 23 nt, synthetic construct
  misc_feature 1..23: note = Synthetic
  source 1..23: mol_type = other RNA
caggcatccaagtccttgctgtt

SEQ ID NO: 802 - RNA, 23 nt, synthetic construct
  misc_feature 1..23: note = Synthetic
  source 1..23: mol_type = other RNA
ctcgcacacaggacactggtacg

SEQ ID NO: 803 - RNA, 23 nt, synthetic construct
  misc_feature 1..23: note = Synthetic
  source 1..23: mol_type = other RNA
gaggctctaagtactcccgagaa

SEQ ID NO: 804 - RNA, 23 nt, synthetic construct
  misc_feature 1..23: note = Synthetic
  source 1..23: mol_type = other RNA
ataggatgtgaaataaacctgtc

SEQ ID NO: 805 - RNA, 23 nt, synthetic construct
  misc_feature 1..23: note = Synthetic
  source 1..23: mol_type = other RNA
atacctcctaagattcagaaggg

SEQ ID NO: 806 - RNA, 23 nt, synthetic construct
  misc_feature 1..23: note = Synthetic
  source 1..23: mol_type = other RNA
aagatattttatgtagatgcgta

SEQ ID NO: 807 - RNA, 23 nt, synthetic construct
  misc_feature 1..23: note = Synthetic
  source 1..23: mol_type = other RNA
tgctcttggtgtacatcttgctg

SEQ ID NO: 808 - RNA, 23 nt, synthetic construct
  misc_feature 1..23: note = Synthetic
  source 1..23: mol_type = other RNA
aattcgcacaaactttgagggca

SEQ ID NO: 809 - RNA, 23 nt, synthetic construct
  misc_feature 1..23: note = Synthetic
  source 1..23: mol_type = other RNA
ttcaattggtactaatttctagt

SEQ ID NO: 810 - RNA, 23 nt, synthetic construct
  misc_feature 1..23: note = Synthetic
  source 1..23: mol_type = other RNA
aaatccaagatgctgccctgggc

SEQ ID NO: 811 - RNA, 23 nt, synthetic construct
  misc_feature 1..23: note = Synthetic
  source 1..23: mol_type = other RNA
tttacacaaatgtcaacgtgtta

SEQ ID NO: 812 - RNA, 23 nt, synthetic construct
  misc_feature 1..23: note = Synthetic
  source 1..23: mol_type = other RNA
agttcaattggtactaatttcta

SEQ ID NO: 813 - RNA, 23 nt, synthetic construct
  source 1..23: mol_type = other RNA
gcaacatgtggtatggctgccgg

SEQ ID NO: 814 - DNA, 8137 bp, Homo sapiens
  source 1..8137: mol_type = genomic DNA
gaagttccgttggggaagatggcggcggcctcgagcacccttctcttcttgccgccggggacttcagattgatccttcccgggaagagtagggactgctggtgccctgcgtcccgggatcccgagccaacttgtttcctccgttagtggtggggaagggcttatccttttgtggcggatctagcttctcctcgccttcaggatgaaagctcagggggaaaccgaggagtcagaaaagctgagtaagatgagttctctcctggaacggctccatgcaaaatttaaccaaaatagaccctggagtgaaaccattaagcttgtgcgtcaagtcatggagaagagggttgtgatgagttctggagggcatcaacatttggtcagctgtttggagacattgcagaaggctctcaaagtaacatctttaccagcaatgactgatcgtttggagtccatagcaagacagaatggactgggctctcatctcagtgccagtggcactgaatgttacatcacgtcagatatgttctatgtggaagtgcagttagatcctgcaggacagctttgtgatgtaaaagtggctcaccatggggagaatcctgtgagctgtccggagcttgtacagcagctaagggaaaaaaattttgatgaattttctaagcaccttaagggccttgttaatctgtataaccttccaggggacaacaaactgaagactaaaatgtacttggctctccaatccttagaacaagatctttctaaaatggcaattatgtactggaaagcaactaatgctggtcccttggataagattcttcatggaagtgttggctatctcacaccaaggagtgggggtcatttaatgaacctgaagtactatgtctctccttctgacctactggatgacaagactgcatctcccatcattttgcatgagaataatgtttctcgatctttgggcatgaatgcatcagtgacaattgaaggaacatctgctgtgtacaaactcccaattgcaccattaattatggggtcacatccagttgacaataaatggaccccttccttctcctcaatcaccagtgccaacagtgttgatcttcctgcctgtttcttcttgaaatttccccagccaatcccagtatctagagcatttgttcagaaactgcagaactgcacaggaattccattgtttgaaactcaaccaacttatgcacccctgtatgaactgatcactcagtttgagctatcaaaggaccctgaccccatacctttgaatcacaacatgagattttatgctgctcttcctggtcagcagcactgctatttcctcaacaaggatgctcctcttccagatggccgaagtctacagggaacccttgttagcaaaatcacctttcagcaccctggccgagttcctcttatcctaaatctgatcagacaccaagtggcctataacaccctcattggaagctgtgtcaaaagaactattctgaaagaagattctcctgggcttctccaatttgaagtgtgtcctctctcagagtctcgtttcagcgtatcttttcagcaccctgtgaatgactccctggtgtgtgtggtaatggatgtgcaggactcaacacatgtgagctgtaaactctacaaagggctgtcggatgcactgatctgcacagatgacttcattgccaaagttgttcaaagatgtatgtccatccctgtgacgatgagggctattcggaggaaagctgaaaccattcaagccgacaccccagcactgtccctcattgcagagacagttgaagacatggtgaaaaagaacctgcccccggctagcagcccagggtatggcatgaccacaggcaacaacccaatgagtggtaccactacaccaaccaacacctttccggggggtcccattaccaccttgtttaatatgagcatgagcatcaaagatcggcatgagtcggtgggccatggggaggacttcagcaaggtgtctcagaacccaattcttaccagtttgttgcaaatcacagggaacggggggtctaccattggctcgagtccgacccctcctcatcacacgccgccacctgtctcttcgatggccggcaacaccaagaaccacccgatgctcatgaaccttcttaaagataatcctgcccaggatttctcaaccctttatggaagcagccctttagaaaggcagaactcctcttccggctcaccccgcatggaaatatgctcggggagcaacaagaccaagaaaaagaagtcatcaagattaccacctgagaaaccaaagcaccagactgaagatgactttcagagggagctattttcaatggatgttgactcacagaaccctatctttgatgtcaacatgacagctgacacgctggatacgccacacatcactccagctccaagccagtgtagcactcccccaacaacttacccacaaccagtacctcacccccaacccagtattcaaaggatggtccgactatccagttcagacagcattggcccagatgtaactgacatcctttcagacattgcagaagaagcttctaaacttcccagcactagtgatgattgcccagccattggcacccctcttcgagattcttcaagctctgggcattctcagagtaccctgtttgactctgatgtctttcaaactaacaataatgaaaatccatacactgatccagctgatcttattgcagatgctgctggaagccccagtagtgactctcctaccaatcatttttttcatgatggagtagatttcaatcctgatttattgaacagccagagccaaagtggttttggagaagaatattttgatgaaagcagccaaagtggggataatgatgatttcaaaggatttgcatctcaggcactaaatactttgggggtgccaatgcttggaggtgataatggggagaccaagtttaagggcaataaccaagccgacacagttgatttcagtattatttcagtagccggcaaagctttagctcctgcagatcttatggagcatcacagtggtagtcagggtcctttactgaccactggggacttagggaaagaaaagactcaaaagagggtaaaggaaggcaatggcaccagtaatagtactctctcggggcccggattagacagcaaaccagggaagcgcagtcggaccccttctaatgatgggaaaagcaaagataagcctccaaagcggaagaaggcagacactgagggaaagtctccatctcatagttcttctaacagaccttttaccccacctaccagtacaggtggatctaaatcgccaggcagtgcaggaagatctcagactcccccaggtgttgccacaccacccattcccaaaatcactattcagattcctaagggaacagtgatggtgggcaagccttcctctcacagtcagtataccagcagtggttctgtgtcttcctcaggcagcaaaagccaccatagccattcttcctcctcttcctcatctgcttccacctcagggaagatgaaaagcagtaaatcagaaggttcatcaagttccaagttaagtagcagtatgtattctagccaggggtcttctggatctagccagtccaaaaattcatcccagtctggggggaagccaggctcctctcccataaccaagcatggactgagcagtggctctagcagcaccaagatgaaacctcaaggaaagccatcatcacttatgaatccttctttaagtaaaccaaacatatccccttctcattcaaggccacctggaggctctgacaagcttgcctctccaatgaagcctgttcctggaactcctccatcctctaaagccaagtcccctatcagttcaggttctggtggttctcatatgtctggaactagttcaagctctggcatgaagtcatcttcagggttaggatcctcaggctcgttgtcccagaaaactcccccatcatctaattcctgtacggcatcttcctcctccttttcctcaagtggctcttccatgtcatcctctcagaaccagcatgggagttctaaaggaaaatctcccagcagaaacaagaagccgtccttgacagctgtcatagataaactgaagcatggggttgtcaccagtggccctgggggtgaagacccactggacggccagatgggggtgagcacaaattcttccagccatcctatgtcctccaaacataacatgtcaggaggagagtttcagggcaagcgtgagaaaagtgataaagacaaatcaaaggtttccacctccgggagttcagtggattcttctaagaagacctcagagtcaaaaaatgtggggagcacaggtgtggcaaaaattatcatcagtaagcatgatggaggctcccctagcattaaagccaaagtgactttgcagaaacctggggaaagtagtggagaagggcttaggcctcaaatggcttcttctaaaaactatggctctccactcatcagtggttccactccaaagcatgagcgtggctctcccagccatagtaagtcaccagcatataccccccagaatctggacagtgaaagtgagtcaggctcctccatagcagagaaatcttatcagaatagtcccagctcagacgatggtatccgaccacttccagaatacagcacagagaaacataagaagcacaaaaaggaaaagaagaaagtaaaagacaaagatagggaccgagaccgggacaaagaccgagacaagaaaaaatctcatagcatcaagccagagagttggtccaaatcacccatctcttcagaccagtccttgtctatgacaagtaacacaatcttatctgcagacagaccctcaaggctcagcccagactttatgattggggaggaagatgatgatcttatggatgtggccctgattgggaattaggaaccttatttcctaaaagaaacagggccagaggaaaaaaaactattgataagtttataggcaaaccaccataaggggtgagtcagacaggtctgatttggttaagaatcctaaatggcatggctttgacatcaagctgggtgaattagaaaggcatatccagaccctattaaagaaaccacagggtttgattctggttaccaggaagtcttctttgttcctgtgccagaaagaaagttaaaatacttgcttaagaaagggaggggggtgggaggggtgtagggagagggaagggagggaaacagttttgtgggaaatattcatatatattttcttctccctttttccatttttaggccatgttttaaactcattttagtgcatgtatatgaagggctgggcagaaaatgaaaaagcaatacattccttgatgcatttgcatgaaggttgttcaactttgtttgaggtagttgtccgtttgagtcatgggcaaatgaaggactttggtcattttggacacttaagtaatgtttggtgtctgtttcttaggagtgactgggggagggaagattattttagctatttatttgtaatattttaaccctttatctgtttgtttttatacagtgtttcgttctaaatctatgaggtttagggttcaaaatgatggaaggccgaagagcaaggcttatatggtggtagggagcttatagcttgtgctaatactgtagcatcaagcccaagcaaattagtcagagcccgcctttagagttaaatataatagaaaaaccaaaatgatatttttattttaggagggtttaaatagggttcagagatcataggaatattaggagttacctctctgtggaggtattgacttgtaatctcattttcctttcaaaaaaaaaaaaaaaagctaaggtggcttgttgggatgtaaacatgttttcagatgcagtaaggtttagtgtaggacagccttcctgacccagtggcatgaaaaccattacaggattaatagttctcctacttccacaatgtgccaaaagtctgcatcccagcattttgtttgcaggagaactgatgccattcctaagagctggactcactgtttctcttcatcacaaggagaaggagtccaaactttaatcactccactgtatgctccctgagataaaacagtaaaaaatccgcagccatagttcacttaaaacaatttcaagctcacttttgaagtaatgggggcctggaatgctaggtgagcatgaagataaacccttgctactatgtagcaacccaattggacctttttggagaaataggtctgagtctggattctgggggacatcaataagagcccttcacataaaaatatagaaatccaggagactgtttcgagtgcaacagaagttctcagtatttggagggtcctctcaaaaattctgcggccttactttgatattgacacctgcactgtgccattcctgattattccattcaggatctgtatcagcgggatggggcatggtccccagcacaactcttctgggttaaaaaaaaaaagccaggtgattcctttgtgtgttatgtcgtaagtggagtgacttcatcatatatggaagaagatttctatattcagctttttctgcaggttggagtcagcatagagttggaaaatcagctttggctttctttcctgtctcatttcctctagtgttctcctttttattgtcatcagctctcaacaactctgccacttttgtgtcccaaggtaataagatgtaggaaacaaaacattgtaaagtggagcaagaaaagttatcaattaaccacatcagagtcaaatgtcttgggtgacactaaggaggatatgggcaggtgataccagagtgctttatcttgtgatgttgatacagtagcagcctctcagacattcagccaggttggatttctcatgagtttgtcacctagttttgaatcctatcccgttggtttctgcaggaaaaaaaaaaaaatttatgtggtttttaaaatttgttctgagtggggagaatcttagggggaatgtactgaatagtatcatgggctcagctcccccatgcagggccaacaaataccaaaatgagtaaactgggaagcttttctctctttctgtcttcatcccagatcaaagaatcccgagttaggatctggatgaaggataagcccctgaattgtcgatgggctcacccccacactgacccagcatctgaacttgcttaacagggagccggggctaaactgcttcaccctgcctgagaaccagggagcactgcatttctccacagggtggaggagaagaggcagaataaaccaagcctgggacacctccctcctgtctaggtgtactcattcttctgtttcaaaagaaggcaaggacatgaagtcaacttctacctatcttctgctgctggtgtcttatgtattctcagtttgacctgattcctcttctgtcttttgacttaacattaggggttcttggtcataacctgctctgatgtacataaagatttcaggttcaatatcaatgtgtcttaaaacagaagtattttagcgggtggggggtggggtggtggggacaaacaacgcaggatataattgccaaaaccaggcttgaggttggtgactcttgaaagattttctttcttcaggcctagatcagaaaattaagtgcagcaatatcatgaattctcagaagccctttcagggagccagtgagtcatacagtatccacagttgagtcacttaaagatgtcagtatacgaaacattattcacaatccttgggcaatctcatttttttttccttctcccctcctcccctgccccccatacatttctatccttgagttagttttggaggggcaggaagtacttaacatctcagaagctagattgggaaacatgctcagctataagaactgagctttaaattttgagtttaaaaatgtacatcaggagcagctggggagggtctttttttaaaaaaatctttcaaatttggttttctgtgcatatggccgttttgtaaatactttggggtttttcatttttttgaaagtagatgaaatctgttgtgggatttttttcccgaaacattacaaaataacctgtttatttacatgcaaataaacttctttgataaaaagtaa

SEQ ID NO: 815 - DNA, 6518 bp, Mus musculus
  source 1..6518: mol_type = genomic DNA
gatctttgggaagttccgttggggaagatggcggcggccgcgagcacccttctcttcttgccgccggggacttcagactgagccttccccggaagagtcggggccgctggtgcgccgcttccccggagcccaggctaacttggttcccctctgagtggcggggaaaggctccccggctcgtggcggacccaagacctccccgctgtcaggatgaaggctcagggggaaaccgaggactcagagaggctgagtaagatgagctccctcctggaacggctccatgcaaaatttaaccagaacagaccttggagtgaaaccattaagcttgtgcgtcaagtaatggagaagagggtcgtaatgagttctggagggcatcagcatttggtcagctgtttggagacattgcagaaggctctcaaagtaacatctttgccagcaatgactgatcgtttggaatctatagccagacagaatggactgggctctcacctcagtgccagtggcactgagtgttacatcacgtcagatatgttctatgtggaagtgcagttagatcctgcaggacagctttgtgatgtcaaagtggctcaccatggggagaatcctgtgagctgtccagagcttgtacagcagttaagggaaaagaattttgaggaattttccaagcatcttaagggtcttgttaatctgtataatctcccaggggacaacaaactgaagactaaaatgtatctggctctccaatccttagaacaggacctttctaaaatggctattatgtactggaaggcaaccaacgccgctcccttggataagattcttcatggaagtgttggttatctcaccccgcggagtgggggtcatttaatgaatatgaaatactatgcctctccatctgacctgctggatgataagactgcctctcctatcattttgcatgaaaagaatgttcctcggtctttgggaatgaatgcctcagtgacaattgaaggaacctctgctatgtacaaactcccaattgccccattaattatggggtcacacccagctgacaacaaatggaccccttctttctccgcagtcactagtgccaacagtgttgatcttcctgcgtgtttcttcttgaaatttccccagccaattccagtatctaaagcatttgttcagaaactgcaaaattgcacaggaatcccgttgtttgagactccgcccacttacctgcccctgtatgaactcatcactcagtttgagctgtcaaaggatcctgaccctttacctttgaatcacaacatgcgattttacgctgctcttccaggtcagcagcactgctattttctcaataaagatgctcctcttcctgatggtcagagcctgcagggaacactggtcagcaaaatcaccttccagcaccctggccgagttcctcttatcttgaatatgatcagacaccaagtggcctataacactctaattggaagctgtgtcaaaagaactattttaaaagaagattctcctgggctcctccagtttgaagtgtgtcctctctcagaatctcgcttcagtgtatcttttcagcaccctgtgaatgactcccttgtgtgtgtggtgatggatgtgcaagactcaacacatgtgagctgtaaactctacaaggggctgtcagatgcactaatctgtacagacgacttcattgccaaagttgttcaaagatgtatgtccattcctgtgacgatgagggctattcggaggaaggctgaaaccatacaggctgacaccccagcactgtctctcattgcagagacagttgaagacatggtgaaaaagaacctgcccccggctagcagcccagggtatggcatgaccacaggcaacaacccaatgagtggtaccactacaccaaccaacacctttccggggggtcccattaccaccttgtttaatatgagcatgagcatcaaagatcggcatgagtcggtgggccatggggaggacttcagcaaggtgtctcagaacccaattcttaccagtttgttgcaaatcacagggaacggggggtctaccattggctcgagtccgacccctcctcatcacacgccgccacctgtctcttcgatggccggcaacaccaagaaccacccgatgctcatgaaccttcttaaagataaccctgcccaggatttctcaaccctttatggaagcagccctttagaaaggcagaactcctcttccggatcaccccggatggaaatgtgctcggggagcaacaaggccaagaagaagaagtcgtcaagagtcccacctgacaaacccaagcaccagactgaagacgatttccagagggagctcttttccatggatgtcgactcacagaaccctatgtttgacgtcagcatgaccgctgacgcgctggatacacctcatatcaccccagctccaagccagtgtagcactcccccagcaacgtacccacagccagtgtctcacccccagcccagtattcagaggatggtccgactgtccagttcagacagcattggcccagatgtaactgatattctttcagatattgccgaagaagcttcaaagcttcccagcacgagtgatgactgcccaccaattggcacccctgttcgagattcctcaagttctgggcattctcagagtgccctctttgattctgatgtctttcaaactaataataatgaaaatccatacactgatccagctgaccttattgcagatgctgctggaagccccaatagtgattctcctaccaatcattttttccctgatggagtagatttcaatcctgatttgttgaacagccaaagccaaagtggttttggagaggagtattttgatgaaagtagtcagagtggggataatgatgatttcaaaggatttgcatctcaggcattaaatacattggggatgccaatgcttggaggtgacaatggggagccaaaatttaagggcagcagccaggctgacacggtggacttcagtattatatcagtagccggtaaggctttgggtgctgcagatctgatggagcaccacagtgggagtcagagtcctttactgaccactggagaattagggaaagaaaaaactcaaaagagggtgaaggaaggcaacggcacaggtgctagcagtggatcaggtccagggtcagacagcaagccaggcaagcgcagccgcactccctccaatgatgggaagagcaaggataagcctccaaagcggaagaaggcagacactgaggggaagtccccatctcacagttcttctaatagacctttcaccccacctaccagcacgggtgggtccaaatccccaggcagttcaggacgatctcagacgcccccaggtgttgccaccccgcccattcccaagattaccattcagattcctaaagggacagtgatggtgggcaagccctcctctcacagtcagtacactagcagtggttctgtgtcttcctctggcagcaaaagccaccatagtcattcttcctcctcctcttccttagcttctgcttccacctcaggcaaggtgaaaagcagtaaatctgaaggctcatcaagttccaagctcagtggcagtatgtatgctagccaagggtcttctggatccagccagtccaaaaattcatctcagactggggggaagccaggctcctctcccattaccaaacatggactgagcagtgggtccagcagtaccaagatgaaacctcaaggcaagccatcctcccttatgaacccttctataagtaagccaaacatatccccttcccattcaaggcctcccggaggctcagataagcttgcctctccaatgaagcctgttcctggaacccccccatcctctaaagccaagtcccctatcagttcaggttccagtggttctcatgtgtcaggaactagttcaagctctggtatgaagtcatcttcagggtcagcatcctcaggctcagtgtctcaaaaaacccctccagcatctaattcttgtacaccatcttcctcttcgttttcctcaagtggttcttccatgtcatcctctcagaatcaacatggcagttccaaagggaaatctcccagtaggaataagaagccttccttgacagctgtcatagataaattgaagcatggggtggttaccagtgggcctgggggtgaggatccaatagacagtcagatgggcgcaagcacaaattcttctaaccatcccatgtcctccaaacataacacgtcaggaggggagttccagagcaaacgtgagaaaagtgataaagacaaatccaaggtctctgcttctggggggtcagtggattcctctaagaagacttcagagtcaaaaaatgtggggagcacgggggtggcaaaaatcattatcagcaagcacgacggaggctccccgagcatcaaagccaaagtgacgctacagaaacctggagaaagtggtggagatgggctcaggccacagatagcctcatcaaagaactatggctctccacttatcagtggttccactccaaagcacgaacggggttctcccagccacagtaagtcgccagcatatacaccacagaatgtggacagtgaaagtgagtcaggctcctccatagcagagagatcctaccagaacagtcccagctcagaggatggtatccgaccacttccagagtacagcactgagaagcataagaagcacaaaaaggaaaagaagaaagtcagagacaaagacagagacaagaagaagtctcacagcatgaagccagagaactggtcgaaatcccccatttcttcagatccgacggcgtctgtgacaaataaccctatcttatctgcagacaggccttctaggctcagccctgacttcatgattggggaggaagatgatgatctcatggatgtggccctgattggcaattagcctaactttctaaacagacacgtccagaggagaaactaatgatatatgtaaaccaacccgaggggtgagtcagacaggccctgtcagtgcttaagagccctaaagggcatggcctctacaccaagctgggtacatttataaacatacatctagaccctgctgccgaaaccatgtggttggttgttcagaaacaagtcatatttctttgccagaaagcaatgaataaattacttgcttaaggggagaggggtggtgggagagggtgtagagagggaggggtgggaaattgttgtgggaaatattcatatatttttctccctttttccattttcaggacatgctttaaactcattttagtgcatgtatttgaagggctgggcagaaaatgaaaaagcaatacattccttgatgcattcgcatgaaggttgctcacctgtgggagatgcccattggaagcatgggcacgggaaggactttgacagttctggacactgaaagcaatgtttggtgtctgtttcttaggagtgatgggggagggaaaattattttagttatttatttgtaatattttaatccttgatgtttgtttttatgcaatgtttgttcctaaatctatgaaggttatggttcagaacagtaggaggcaggtagcaaggctcgcctggtggggagctcgcagcctgtgctgacgctgcagcaccagtcccacagagctaatcacagcctgtctttggagttgaatagaaaaaccaaaactattatctttggaggtttttcacagggttcagacaccataggaatattaggagtgagttacctccctatgcagataaaagatttatcttctttcattaaaaaggaagggtggctttggggggtatacatttgttttcagagtctataccctatcgtataaaaatcagtatagaattaatagttctcctacttccacaatgtgccaaaagtctacatcccagcattttgtttgcaggagagctgatgccattcctaagagctggactctttgtttctcttcatcacaagaagaaggagttcagacttaaatcactccactgtatgctccccgagataaacagttaaaaaaaaaaaaagcagccatagttcacttaaaacaatttcaagctcacttgaagtgattagggcctggaatgctaagtgagcatgaagataacccttgctaccgtgtagcacacagtcggacctttttggagaaacaggtctgagtctggattctgagggacatcaaaggaagacctcataaatagagaaatgcaggagaccgttttgagtgcaacagaagttctcagtatttggagggtcctctcaaaagtccgcggccttactttgatttcaccacctgcactgtgccattcctgatgattccgtttgggatctgtatcagcggggtgggggtggggcgtgatccccagcacaactcttctggattacaaaacaagcaaaagccaggtgattcatgtttgtgtgtgttataagtggagtgacttcatcagatacggacgatttctacatccaacactgcaggttgttggagttagcat

SEQ ID NO: 816 - DNA, 19 bp, synthetic construct
  misc_feature 1..19: note = Synthetic
  source 1..19: mol_type = other DNA
gttacatcacgtcagatat

SEQ ID NO: 817 - DNA, 19 bp, synthetic construct
  misc_feature 1..19: note = Synthetic
  source 1..19: mol_type = other DNA
atcacgtcagatatgttct

SEQ ID NO: 818 - DNA, 19 bp, synthetic construct
  misc_feature 1..19: note = Synthetic
  source 1..19: mol_type = other DNA
cagatatgttctatgtgga

SEQ ID NO: 819 - DNA, 19 bp, synthetic construct
  misc_feature 1..19: note = Synthetic
  source 1..19: mol_type = other DNA
atcagacaccaagtggcct

SEQ ID NO: 820 - DNA, 19 bp, synthetic construct
  misc_feature 1..19: note = Synthetic
  source 1..19: mol_type = other DNA
acttcattgccaaagttgt

SEQ ID NO: 821 - DNA, 19 bp, synthetic construct
  misc_feature 1..19: note = Synthetic
  source 1..19: mol_type = other DNA
aagttgttcaaagatgtat

SEQ ID NO: 822 - DNA, 19 bp, synthetic construct
  misc_feature 1..19: note = Synthetic
  source 1..19: mol_type = other DNA
gttcaaagatgtatgtcca

SEQ ID NO: 823 - DNA, 19 bp, synthetic construct
  misc_feature 1..19: note = Synthetic
  source 1..19: mol_type = other DNA
ccagggtatggcatgacca

SEQ ID NO: 824 - DNA, 19 bp, synthetic construct
  misc_feature 1..19: note = Synthetic
  source 1..19: mol_type = other DNA
cttgtttaatatgagcatg

SEQ ID NO: 825 - DNA, 19 bp, synthetic construct
  misc_feature 1..19: note = Synthetic
  source 1..19: mol_type = other DNA
acccgatgctcatgaacct

SEQ ID NO: 826 - DNA, 19 bp, synthetic construct
  misc_feature 1..19: note = Synthetic
  source 1..19: mol_type = other DNA
gagtagatttcaatcctga

SEQ ID NO: 827 - DNA, 19 bp, synthetic construct
  misc_feature 1..19: note = Synthetic
  source 1..19: mol_type = other DNA
agcagtggttctgtgtctt

SEQ ID NO: 828 - DNA, 19 bp, synthetic construct
  misc_feature 1..19: note = Synthetic
  source 1..19: mol_type = other DNA
ccaattcttaccagtttgt

SEQ ID NO: 829 - DNA, 19 bp, synthetic construct
  misc_feature 1..19: note = Synthetic
  source 1..19: mol_type = other DNA
gaggacttcagcaaggtgt

SEQ ID NO: 830 - DNA, 19 bp, synthetic construct
  misc_feature 1..19: note = Synthetic
  source 1..19: mol_type = other DNA
caggctcctccatagcaga

SEQ ID NO: 831 - DNA, 19 bp, synthetic construct
  misc_feature 1..19: note = Synthetic
  source 1..19: mol_type = other DNA
gtgtctgtttcttaggagt

SEQ ID NO: 832 - DNA, 19 bp, synthetic construct
  misc_feature 1..19: note = Synthetic
  source 1..19: mol_type = other DNA
aaggctctcaaagtaacat

SEQ ID NO: 833 - DNA, 19 bp, synthetic construct
  misc_feature 1..19: note = Synthetic
  source 1..19: mol_type = other DNA
tgagcatcaaagatcggca

SEQ ID NO: 834 - DNA, 19 bp, synthetic construct
  misc_feature 1..19: note = Synthetic
  source 1..19: mol_type = other DNA
gcaatacattccttgatgc

SEQ ID NO: 835 - DNA, 19 bp, synthetic construct
  misc_feature 1..19: note = Synthetic
  source 1..19: mol_type = other DNA
aaaacaatttcaagctcac

SEQ ID NO: 836 - DNA, 19 bp, synthetic construct
  misc_feature 1..19: note = Synthetic
  source 1..19: mol_type = other DNA
gcatgagcatcaaagatcg

SEQ ID NO: 837 - DNA, 19 bp, synthetic construct
  misc_feature 1..19: note = Synthetic
  source 1..19: mol_type = other DNA
tgtacaaactcccaattgc

SEQ ID NO: 838 - DNA, 19 bp, synthetic construct
  misc_feature 1..19: note = Synthetic
  source 1..19: mol_type = other DNA
tcaggctcctccatagcag

SEQ ID NO: 839 - DNA, 19 bp, synthetic construct
  misc_feature 1..19: note = Synthetic
  source 1..19: mol_type = other DNA
tgtctgtttcttaggagtg

SEQ ID NO: 840 - RNA, 21 nt, synthetic construct
  misc_feature 1..21: note = Synthetic
  source 1..21: mol_type = other RNA
atgttacatcacgtcagatat

SEQ ID NO: 841 - RNA, 21 nt, synthetic construct
  misc_feature 1..21: note = Synthetic
  source 1..21: mol_type = other RNA
acatcacgtcagatatgttct

SEQ ID NO: 842 - RNA, 21 nt, synthetic construct
  misc_feature 1..21: note = Synthetic
  source 1..21: mol_type = other RNA
gtcagatatgttctatgtgga

SEQ ID NO: 843 - RNA, 21 nt, synthetic construct
  misc_feature 1..21: note = Synthetic
  source 1..21: mol_type = other RNA
tgatcagacaccaagtggcct

SEQ ID NO: 844 - RNA, 21 nt, synthetic construct
  misc_feature 1..21: note = Synthetic
  source 1..21: mol_type = other RNA
tgacttcattgccaaagttgt

SEQ ID NO: 845 - RNA, 21 nt, synthetic construct
  misc_feature 1..21: note = Synthetic
  source 1..21: mol_type = other RNA
caaagttgttcaaagatgtat

SEQ ID NO: 846 - RNA, 21 nt, synthetic construct
  misc_feature 1..21: note = Synthetic
  source 1..21: mol_type = other RNA
ttgttcaaagatgtatgtcca

SEQ ID NO: 847 - RNA, 21 nt, synthetic construct
  misc_feature 1..21: note = Synthetic
  source 1..21: mol_type = other RNA
gcccagggtatggcatgacca

SEQ ID NO: 848 - RNA, 21 nt, synthetic construct
  misc_feature 1..21: note = Synthetic
  source 1..21: mol_type = other RNA
accttgtttaatatgagcatg

SEQ ID NO: 849 - RNA, 21 nt, synthetic construct
  misc_feature 1..21: note = Synthetic
  source 1..21: mol_type = other RNA
ccacccgatgctcatgaacct

SEQ ID NO: 850 - RNA, 21 nt, synthetic construct
  misc_feature 1..21: note = Synthetic
  source 1..21: mol_type = other RNA
tggagtagatttcaatcctga

SEQ ID NO: 851 - RNA, 21 nt, synthetic construct
  misc_feature 1..21: note = Synthetic
  source 1..21: mol_type = other RNA
ccagcagtggttctgtgtctt

SEQ ID NO: 852 - RNA, 21 nt, synthetic construct
  misc_feature 1..21: note = Synthetic
  source 1..21: mol_type = other RNA
acccaattcttaccagtttgt

SEQ ID NO: 853 - RNA, 21 nt, synthetic construct
  misc_feature 1..21: note = Synthetic
  source 1..21: mol_type = other RNA
gggaggacttcagcaaggtgt

SEQ ID NO: 854 - RNA, 21 nt, synthetic construct
  misc_feature 1..21: note = Synthetic
  source 1..21: mol_type = other RNA
gtcaggctcctccatagcaga

SEQ ID NO: 855 - RNA, 21 nt, synthetic construct
  misc_feature 1..21: note = Synthetic
  source 1..21: mol_type = other RNA
tggtgtctgtttcttaggagt

SEQ ID NO: 856 - RNA, 21 nt, synthetic construct
  misc_feature 1..21: note = Synthetic
  source 1..21: mol_type = other RNA
agaaggctctcaaagtaacat

SEQ ID NO: 857 - RNA, 21 nt, synthetic construct
  misc_feature 1..21: note = Synthetic
  source 1..21: mol_type = other RNA
catgagcatcaaagatcggca

SEQ ID NO: 858 - RNA, 21 nt, synthetic construct
  misc_feature 1..21: note = Synthetic
  source 1..21: mol_type = other RNA
aagcaatacattccttgatgc

SEQ ID NO: 859 - RNA, 21 nt, synthetic construct
  misc_feature 1..21: note = Synthetic
  source 1..21: mol_type = other RNA
ttaaaacaatttcaagctcac

SEQ ID NO: 860 - RNA, 21 nt, synthetic construct
  misc_feature 1..21: note = Synthetic
  source 1..21: mol_type = other RNA
gagcatgagcatcaaagatcg

SEQ ID NO: 861 - RNA, 21 nt, synthetic construct
  misc_feature 1..21: note = Synthetic
  source 1..21: mol_type = other RNA
tgtgtacaaactcccaattgc

SEQ ID NO: 862 - RNA, 21 nt, synthetic construct
  misc_feature 1..21: note = Synthetic
  source 1..21: mol_type = other RNA
agtcaggctcctccatagcag

SEQ ID NO: 863 - RNA, 21 nt, synthetic construct
  misc_feature 1..21: note = Synthetic
  source 1..21: mol_type = other RNA
ggtgtctgtttcttaggagtg

SEQ ID NO: 864 - RNA, 23 nt, synthetic construct
  misc_feature 1..23: note = Synthetic
  source 1..23: mol_type = other RNA
atatctgacgtgatgtaacattc

SEQ ID NO: 865 - RNA, 23 nt, synthetic construct
  misc_feature 1..23: note = Synthetic
  source 1..23: mol_type = other RNA
agaacatatctgacgtgatgtaa

SEQ ID NO: 866 - RNA, 23 nt, synthetic construct
  misc_feature 1..23: note = Synthetic
  source 1..23: mol_type = other RNA
tccacatagaacatatctgacgt

SEQ ID NO: 867 - RNA, 23 nt, synthetic construct
  misc_feature 1..23: note = Synthetic
  source 1..23: mol_type = other RNA
aggccacttggtgtctgatcaga

SEQ ID NO: 868 - RNA, 23 nt, synthetic construct
  misc_feature 1..23: note = Synthetic
  source 1..23: mol_type = other RNA
acaactttggcaatgaagtcatc

SEQ ID NO: 869 - RNA, 23 nt, synthetic construct
  misc_feature 1..23: note = Synthetic
  source 1..23: mol_type = other RNA
atacatctttgaacaactttggc

SEQ ID NO: 870 - RNA, 23 nt, synthetic construct
  misc_feature 1..23: note = Synthetic
  source 1..23: mol_type = other RNA
tggacatacatctttgaacaact

SEQ ID NO: 871 - RNA, 23 nt, synthetic construct
  misc_feature 1..23: note = Synthetic
  source 1..23: mol_type = other RNA
tggtcatgccataccctgggctg

SEQ ID NO: 872 - RNA, 23 nt, synthetic construct
  misc_feature 1..23: note = Synthetic
  source 1..23: mol_type = other RNA
catgctcatattaaacaaggtgg

SEQ ID NO: 873 - RNA, 23 nt, synthetic construct
  misc_feature 1..23: note = Synthetic
  source 1..23: mol_type = other RNA
aggttcatgagcatcgggtggtt

SEQ ID NO: 874 - RNA, 23 nt, synthetic construct
  misc_feature 1..23: note = Synthetic
  source 1..23: mol_type = other RNA
tcaggattgaaatctactccatc

SEQ ID NO: 875 - RNA, 23 nt, synthetic construct
  misc_feature 1..23: note = Synthetic
  source 1..23: mol_type = other RNA
aagacacagaaccactgctggta

SEQ ID NO: 876 - RNA, 23 nt, synthetic construct
  misc_feature 1..23: note = Synthetic
  source 1..23: mol_type = other RNA
acaaactggtaagaattgggttc

SEQ ID NO: 877 - RNA, 23 nt, synthetic construct
  misc_feature 1..23: note = Synthetic
  source 1..23: mol_type = other RNA
acaccttgctgaagtcctcccca

SEQ ID NO: 878 - RNA, 23 nt, synthetic construct
  misc_feature 1..23: note = Synthetic
  source 1..23: mol_type = other RNA
tctgctatggaggagcctgactc

SEQ ID NO: 879 - RNA, 23 nt, synthetic construct
  misc_feature 1..23: note = Synthetic
  source 1..23: mol_type = other RNA
actcctaagaaacagacaccaaa

SEQ ID NO: 880 - RNA, 23 nt, synthetic construct
  misc_feature 1..23: note = Synthetic
  source 1..23: mol_type = other RNA
atgttactttgagagccttctgc

SEQ ID NO: 881 - RNA, 23 nt, synthetic construct
  misc_feature 1..23: note = Synthetic
  source 1..23: mol_type = other RNA
tgccgatctttgatgctcatgct

SEQ ID NO: 882 - RNA, 23 nt, synthetic construct
  misc_feature 1..23: note = Synthetic
  source 1..23: mol_type = other RNA
gcatcaaggaatgtattgctttt

SEQ ID NO: 883 - RNA, 23 nt, synthetic construct
  misc_feature 1..23: note = Synthetic
  source 1..23: mol_type = other RNA
gtgagcttgaaattgttttaagt

SEQ ID NO: 884 - RNA, 23 nt, synthetic construct
  misc_feature 1..23: note = Synthetic
  source 1..23: mol_type = other RNA
cgatctttgatgctcatgctcat

SEQ ID NO: 885 - RNA, 23 nt, synthetic construct
  misc_feature 1..23: note = Synthetic
  source 1..23: mol_type = other RNA
gcaattgggagtttgtacacagc

SEQ ID NO: 886 - RNA, 23 nt, synthetic construct
  misc_feature 1..23: note = Synthetic
  source 1..23: mol_type = other RNA
ctgctatggaggagcctgactca

SEQ ID NO: 887 - RNA, 23 nt, synthetic construct
  misc_feature 1..23: note = Synthetic
  source 1..23: mol_type = other RNA
cactcctaagaaacagacaccaa

SEQ ID NO: 888 - DNA, 10461 bp, Homo sapiens
  source 1..10461: mol_type = genomic DNA
ctctctctggtcggaggcggcggtaatggcggatggtgggttgtggcgccggcggcggctgctgtgagggacgatgagtgcctccttcgtgccgaacggggccagcctggaagattgtcactgtaacctcttctgcctggctgacttgacaggaattaagtggaaaaaatatgtatggcaaggcccaacttctgcccctattctgtttcctgtgacagaagaagaccccattttgagcagttttagtcgctgccttaaggcagatgtacttggtgtttggcggcgagatcaaagacctggaagaagagaattgtggatattttggtggggtgaagaccccagttttgctgaccttattcaccatgacttatcagaagaagaagatggagtgtgggagaatggactttcctatgaatgccgtactctgcttttcaaagcagttcacaatctattggaacggtgtttaatgaacaggaattttgtacgtattggcaagtggtttgtaaagccttatgaaaaagatgaaaaacctataaataaaagtgaacacttgtcctgctccttcacctttttcttgcatggagacagcaatgtttgtaccagtgtggaaattaaccaacatcaacctgtataccttctcagtgaagagcatatcacccttgctcaacagtctaatagcccatttcaagttatcttatgcccatttggactaaatggcactctcacaggacaggcattcaagatgtctgattcagctacaaaaaaattaattggtgaatggaaacagttctatcctatctcatgttgcttgaaggagatgtctgaagaaaaacaggaagatatggattgggaagatgattctttagctgcagtagaagttcttgttgctggtgtccgaatgatctacccagcatgctttgttctagtccctcagtcagacattcctactcctagccctgtgggatccactcactgttcatcttcttgcttgggtgtccaccaagtgcctgcttccacaagagatcctgctatgtcttcggttacgcttacaccacctacgtctcctgaggaagtccaaacagttgatcctcagtctgtccagaagtgggtcaaattttcttcagtatctgatggcttcaactccgatagtactagccaccatggtgggaaaatacccagaaaattagcaaatcatgtggtggatagagtttggcaagaatgcaatatgaacagagcacagaacaagaggaagtattctgcttcatcaggtggtctatgcgaagaagcgacagctgctaaagtggcatcctgggattttgttgaagccacacaaagaacaaattgcagttgtttgaggcacaaaaatctcaagtcaagaaatgctggacaacaaggacaggcaccatctttaggtcagcaacaacaaatacttcctaagcacaagaccaatgagaagcaagaaaagagtgaaaagccacagaaacgccccttgactccttttcaccatcgtgtgtctgttagtgatgatgttggcatggacgcagattcagccagccaaagacttgtgatctctgctccagacagtcaagtgagattttcaaatatccgaactaatgatgtagcaaagactcctcagatgcatggcaccgaaatggcaaattcacctcaaccacccccacttagtcctcacccttgtgatgtggttgatgaaggagtgactaaaacaccttcaactcctcagagtcaacatttttatcaaatgccaacaccagatcccttggttccttctaaaccaatggaagataggatagacagtttgtcccagtctttcccacctcaatatcaggaagctgtagaacctacagtatatgttggtacagcagtaaacttggaagaagatgaagccaatatagcctggaagtattacaagttcccaaagaaaaaagatgtagagtttttaccacctcaacttccaagtgataaattcaaggatgatccagttggaccttttggacaggaaagtgtaacatcagttacagagttaatggtgcaatgtaagaaacctttaaaagtttctgatgaattagtgcagcaatatcaaattaaaaaccagtgtctttcagcaatagcatctgatgcagaacaagaacctaaaattgatccatatgcatttgttgaaggagatgaggaattcctttttcctgataaaaaagatagacaaaatagtgagagagaagctggaaaaaaacacaaggtagaagatgggacatctagtgtaacagtgttatcacatgaagaagatgctatgtcattatttagtccctctatcaagcaagatgctccacgccctactagtcatgcccgtcctccatcaacaagtttgatttatgactcagacctggctgtctcttatactgaccttgataatctcttcaattctgatgaagatgaactaacacctggatctaaaaaatcagcaaatggatcagatgataaagccagctgcaaggaatcaaagacaggaaatctggacccgttatcttgcataagcactgcagatcttcataaaatgtatcctacaccaccatcattggaacaacatattatgggattttccccaatgaatatgaataataaagaatatggtagtatggatacaacacctggaggaactgttctagaaggaaatagttctagtataggagcgcagttcaaaattgaggttgatgagggattctgtagccccaaaccttctgaaattaaagatttttcttatgtctataagcctgaaaattgtcaaattctagtgggatgttccatgtttgcacctctaaaaactctaccaagccaatatctgccccctatcaaattgccagaagagtgtatttaccgtcagagttggactgttggaaaattggaattgctttcttcagggccttcaatgccattcatcaaagagggtgatggaagtaatatggatcaagaatatggcactgcttatacacctcaaactcatacttcttttgggatgcctcctagcagtgcacctcctagtaacagcggagcaggaattcttccttctccatccacccctcggtttccaactccaaggactccaaggactcctcggactcctcgtggagctggtggacctgctagtgctcaaggttcagtcaaatatgaaaattcagacttgtattcaccagcttctaccccatctacatgcagaccccttaattctgttgaacctgcaactgtcccttccatccctgaagcacacagtctttatgtaaacctcatcctttcagaatcagttatgaatttgtttaaagactgtaactttgatagttgttgcatctgtgtttgcaacatgaacatcaagggtgccgatgttggagtttacattccagatccaacgcaggaagcacaatataggtgtacctgtggcttcagtgctgtcatgaacagaaaatttggaaacaattcaggattatttcttgaagatgaactagatatcataggacgcaatacagactgtggcaaagaagcagaaaaacgttttgaagctctcagggctacctctgctgaacatgttaatggaggactaaaggaatctgaaaaattatctgatgatttgatattattgctacaagatcagtgcactaatttattttcaccctttggagcagcagaccaagatccttttcctaaaagtggtgtaattagcaattgggtacgtgttgaagagcgtgactgttgcaatgactgctaccttgcattagaacatgggcgtcagttcatggataacatgtcaggaggaaaagttgatgaagcacttgtgaaaagttcatgcttacacccctggtccaaaagaaacgatgtgagtatgcagtgctcacaggatatacttcgaatgctcctctctcttcagccagttcttcaggatgccattcagaaaaaaagaacagtaagaccttggggtgttcagggtcctctcacttggcaacaatttcataaaatggctggccgaggctcttatggaactgatgaatccccagaaccactgccaatccccacatttttgttgggttatgattatgattatctggtgctttctccatttgctcttccttattgggagagacttatgctggaaccctatggatctcaaagagatatagcctatgttgtactgtgtccagaaaatgaagccttgttaaatggagcaaaaagcttttttagagatcttactgcaatatatgagtcctgtcgattaggtcaacatagacctgtttctcgactgttaacagatgggatcatgagagttggatctactgcatcaaagaaactatcagaaaagttggtagcagaatggttttctcaggcagctgacggtaacaatgaagcattttctaaactcaagctttatgcacaagtctgcagatatgacctaggtccttatcttgcttccctgccattggacagctctctactttcccagccaaatttagttgcccctacaagtcagtctttgattactccacctcagatgacaaatactggaaatgctaatactccatctgccaccttagcatctgcagcgagcagcactatgacagtgacttcaggtgttgccatatctacttcagttgccacagctaattcaactttgaccacagcttcaacttcatcttcatcatcctccaacttgaatagtggagtatcatcaaataaactaccttcgtttccaccctttggcagtatgaacagtaatgctgcaggatccatgtctacacaagcaaatacagttcagagtggtcagctaggagggcaacagacatcagctctacagacagctgggatttctggagaatcatcttcacttcccactcagccgcatcctgatgtgtctgaaagcacgatggatcgggataaagtgggaatccccacagatggtgattcacatgcagtcacgtatccacctgcaattgttgtttatataattgatccttttacatacgaaaatacagacgagagcactaactcttctagtgtgtggacattggggctacttcgatgctttctagaaatggtccagactcttcctcctcatatcaagagtactgtttctgtacagattattccttgtcagtacctgttgcaacctgtgaagcatgaagatagagaaatctatccccagcatttaaaatccctggctttttcggcctttacccagtgtcggaggccacttccaacatcaaccaatgtgaaaacattgactggctttggtccaggtttagccatggaaactgcccttagaagtcctgatagaccagagtgtattcgactttatgcacctccttttattctggctccagtgaaggacaaacagacagagctaggagaaacatttggagaagctggacagaaatataatgttctttttgtgggatactgtttatcacatgatcaaaggtggattcttgcatcttgcacagatctatatggagaacttttagaaacttgtatcattaacatcgatgttccaaatagggctcgtcggaaaaaaagttctgctagaaaatttggtctacagaaactttgggagtggtgcttaggacttgtacaaatgagttcattgccatggagagttgtaattggtcgtctaggaaggattggtcatggagaattgaaagattggagctgtttgctgagtcgtcgaaacttgcagtctctaagtaaaaggctcaaagacatgtgtagaatgtgtggtatatctgctgcagactcccctagcattctcagtgcttgcttggtggcaatggagccgcaaggctcttttgttattatgccagattctgtgtcaactggttctgtatttggaagaagcacgactctaaatatgcagacatctcagctaaataccccacaggatacatcatgtactcatatacttgtgtttcctacttctgcttctgtgcaagtagcttcagctacttataccactgaaaatttggatttagctttcaatcccaacaatgatggagcagatggaatgggtatctttgatttgttagacacaggagatgatcttgaccctgatatcattaatatccttcctgcttctccaactggttctcctgtacattctccaggatctcattacccccatggaggtgatgcgggcaagggtcagagtactgatcggctactatcaacagaacctcatgaggaagtacctaatattcttcagcaaccattggcccttggttactttgtatcaactgccaaagcaggtccattacctgactggttctggtcagcatgtcctcaagcacaatatcagtgtcccctttttcttaaggcctctttgcacctccacgtgccttcagtgcaatctgacgagctgcttcacagtaaacactcccacccacttgactcaaatcagacttcagatgtcctcaggtttgttttggaacagtacaatgcactctcctggctaacctgtgaccctgcaacccaggacagacgctcatgtctcccaattcattttgtggtgctgaatcagttatataactttattatgaatatgctgtgatcttcatttgatggaactgtgcaagaaaagaacaaggaaaaatggatgtttcgctgcaggattaagttacaattatcttctcagtgaaggtcatttgtgatggggtctaattcttattacttcaacaaatattgttttgacttggggggaggggctataaccctgctatttttcattgactctattgaactctttaggatgatgactgatcatacaaaacgtattataacattttcgtagcaaaattaaccttttttttttccagtcacagtatttgtgaaaagtaatgagccatagtacccagtcatgttaaatgaatattaaaagcatggagaggaaacatgaggaacaatgaatttcaacatatggcttcagaacatgaagatgttcttgtatggattatagtatctagtattcaaaaatgcctgcatctcttctcttatttattgtaagtttttaaatgtataaattgtcttatatttcttaacctcttttataaaaattttcctagaaggtttatactgccttcttgctttaaagcaattggtctaaaatatatgtaatcgtcttaattaaaaagttgcagtagggttgcttttagagtattatttttttgtaagggggtgggtgggacagtaaatttgtattgtctcgatgtacagtttaacggggatagagggggaataatgtccataccattgtgtgtggaggatttacagctaagctgtagttgcagagtacatgtacagtaatgaagttcactgtgtttataaattgaaaaggtaccaggtcttacagcattttatatatcacatctttacagaataacatgatggcaatatacaagtggtattgttaggtggtttaacttagaataaaatgagaattcttcagttatattttgtactatggtttagggctatgactaatatttcaggccatttccggtgaaagaaacttagttttacaagaaaaaccatttgctactgaatgcttaaactaattttagtgtttaatgttacatgcttaaatttttttcagttttaacagtggcatatttaggcatggaaatattattatgaaatttattttcaggatctgctataaggttgaaatttagcccagctctaggcattttacaaattatttttcaagcagtcattcttgattgtttgacttttttttttaaattaaagattgggaatgtatgtgagagtatgcatatgtatgggtgtgtgtgtgtgcgcgcaatcaaactgtggtgtaaatagattctcagtgaattctggtattcagactctattccactagtgaaagaaccattttttaaacttcccttgccttttttatttatttaattttcttggtttggagatgtcagtcccaaacaccagagtctgtacttttctataacacagctcagattaaggtagggcatatgccaaggaggttctcacctccctaaagaagggacttgaattttagggactttaattcacccctccttcaatacaactttcccccttcttgtttgcacatgccaagataactgcttttatgcaggctgtacccccttgaaaaatcctttctacagtgctgctcacaaaagagcccaagttcgcctcctacctgcattgctgacttgaattcacagtcgccgagtctacctagctttcttggaagcagtctagcaaaatttctatttgtacgttcactaattatctacaaggacaaaatcagttgtatttacaaaactctacttcagtgtttgttttagtttttttttttactgaaacttgtttttgtgaatactctgtgcttagaattaaatatcactttcttatgaacaacataacttcttcagattgtgtatatgaaaacattagcaagtcttgttttttctatgaagcaaacacaattggtgacaaaggttgtcaatcatttcttcaaaattataatgcagttctaatggtcagcatattttgatattaaatttaaagatcacctctctgcatttgtttttaaattatgctaatacaccacacattatgttggtatgttttgttctgtactttctttaaaaaaaaaaaaaaaacttgtctgagatttgaaggaaaatgtgcttatttggaatttccataaaaagagtatcctttttatacacttaatagtgactttacaaaataaaagttatattctcagttgtttaaaatcactaacctatgataaccacacctcaatttgaaagtagatttaaaattattccctgacaggttatttaatatggagccataaggagggaacccagtacacaattattttttatttgggaatcagggaatagttcccaaatatacaggatttattgataagattttttttcttcccttcatatatccattcaaactcaatggaaagttattaaataaccattagaaaagctcagtagacttatttgagaaattaagccttgtgcaggatgatggatttgacttactaatgtactgtcacagacaaatatgggtagttttgtttaaataggtaagcaaaatattatactttatagcagtggattaccaacaccttgacttctttgttacagtgctaacatctttttttttgtgcaggtatccatgattattaagcagggtggaagttcagtattttgtcatttaaaaagattagttatataatgtctgcttccagccagtgagaaacatctagccatacctttcttatgcaagccattgagttatcaggactgtgaattaacactgtatgaataaatttctgtacaccttattgtttggccagaaggccaccaagtgtacttatatgtaatccttaaattttaaagtagctgtaatttttaaatatttctaaacttttcttaaaccactaaaattaagctcttactacttagtcaactatcctcagctgtattcgtactcaattgtcagtatggcacagattactgtattaaaatattctcctttcgtcttcatatttaccttctgaggtaattttttaacttaatgtgttactacaaagatttgcagatctttaatcaagcactatgttaatactgtaatatcagaatactatgttgcattatttaaaatgttcaaattgaatagattaaaaagtttttaaatgctattgcatcatataatttgctattcatccactatggcattgcatatcaatcagttaatacacttaatgttgcatgagtgatattttggtctgggtttcctcttaagattttagtttgtctgaattaaggaaaaatgtttttaatatacattcttattttgtcccacccctccagaaataagctggaaatcttaactttttggggggtcttttttggtgttttaatgggcccagaactgtggtttaaatttttatgtatgtattttcttttttgtggagtataaatttaaaaactggatttgggacctaaaatactcctcaggttgatgtattcatgaagttttaaaacatctttagttttcaaagtaaactggatatgtggaccttaaagttattgagtttaagctacaaattgtaacgtcattactggacatgtcagcatcaaccctctcaaaatagcttggtcactttatgaaggggcgttttaaagttgttgtttagcagtgacatttaatatggtccaattgcttttctttttaacgtgacaaaaagagaataaggaacaaacactattgctgccgaatgccataacactgagttgtacaaattgtgattgaggaaatgaaaaggtttatactttttaaaaaaaaaaaaacaaaaacaaaaaacaaaacttcaaatggaataaattattcatgaagccttca

SEQ ID NO: 889 - DNA, 10540 bp, synthetic construct
  misc_feature 1..10540: note = Synthetic
  source 1..10540: mol_type = other DNA
ctctctggtcggaggcggcggtaatggcggatggtgggttgtggcgccggcggcggctgctgtgagggacgatgagttcctccttcgtgtcgaacggggccagcctggaagattgtcactgtaacctcttctgcctggccgacttgacaggaattaagtggaaaagatatgtatggcaaggcccaacttccgcccctattctgtttccggtgacagaagaagaccccattttgagcagttttagtcgatgccttaaggcagatgtacttggtgtttggcggcgagatcaaagacctggaagaagagaattgtggatattttggtggggtaaagatcccaattttgctgaccttattcaccatgacttatcagaagaggaagatggagtatgggagaatggcctttcctatgaatgccgtactttgcttttcaaagcagttcacaatctgttggagcgatgtttgatgaaccgaaactttgtacgaattggcaagtggtttgtgaagccatatgagaaagatgaaaaacctataaataaaagtgaacacttgtcctgctctttcacctttttcttgcatggagacagcaatgtttgtaccagtgtggaaattaaccaacatcaacctgtataccttctcagtgaagagcatgtcacccttgctcaacagtctaatagcccatttcaagttatcttaagtccatttggactaaatggcactctcacgggacaggctttcaagatgtctgattcagctacgaaaaaattaattggtgaatggaaacagttctatcctatttcatgtggtttgaaggagatgtctgaggagaaacaggacgatatggattgggaagacgattctttggctgcggtggaagttcttgttgcgggtgtccgaatgatctacccagcatgctttgtgctagtccctcagtcagacattcctgctcctagctctgtgggagcttctcactgttcagcttcttgcttgggtatccatcaagtgcctgcttccacaagagatcctgctatgtcttcagttactctcactccacctacatctcctgaggaagtccaaacagttgatcctcagtccgcacagaagtgggtcaaattttcttcagtatccgatggcttcagcactgacagtactagccatcatggtgggaaaatacccagaaaattagcaaatcatgtggtggatagagtctggcaagaatgtaatatgaacagattacagaacaagaggaagtattctgctacatccagcggcctgtgtgaggaagagactgccgataaaataggatgctgggactttgttgaagccacacaaagaacaagctgcagttgtttgaggcataaaagtctcaagacaagaaatactgggcaacaaggacaggcaccatctttagggcagcaacagcaagtacttcctaagcacaagaccaatgagaagcaagacaagagtgagaagccacagaagcgccccttgactccctttcaccatcgtgtatcagttagtgatgagattggcatggacacagattcagccagccaaagacttgtgatctctgctgcagatagtcaagtgaggttttcaaacatccgaactaatgatgtagcaaagactcctcagatgcatggcactgaactggcaaattcacctcagcctcccccacttagtcctcatccttgtgatgtggttgatgaaggagtgactaaaacaccttcaactccgcagagtcaacatttttatcaaatgccaacaccggatcccttggttcctaccaaaccaatggaagataggatagacagtttgtcccagtctttcccacctccatttcaggaagctgtagaacctaccgtgtatgttggtacagcagtaagcttggaagaagatgaagctaatgtagcctggaagtattacaaagtcccaaagaaaaaagatgtagaatttttaccacctcaacttccaaatgataaattcaaggatgatccagttggaccttttggacaggaaagtgtaacatcagttacagagttaatggtgcagtgtaagaagcctttaaaagtttctgatgaaatagtccagcaatatcaaattaaaaatcagtatctttcagcaatagcatctgatacagaacaagaacctaaaattgatccatatgcatttgttgaaggagatgaggaattcatttttactgataaaaaagatagacaaaatagcgagagagaagctgggaagaaacacaaggtggaagatgggacatctgctgtcacagtgttatcacacgaagaagatgctatgtcattatttagtccctctaaacaagatgctccacgccctacaaatcatgcccgtcctccatcaaccagtttgatttatgactcagatttggctgtgtcttacactgaccttgataacctcttcaattctgatgaagatgaattaacacctggatctaaaaagtcagcaagtggatcagatgataaagccagctccaaagaatcaaagacaggaaatctggatccgttgtcctgcataagcactgcagacctccacaaaatgtaccccacgccaccctcactggaacagcacattatgggcttctctccaatgaatatgaataacaaagaatacggtagtgtggacacagcacccggagggactgtcctggaaggaaatagctctagtgtaggaacgcagttcagaatcgaggtcgaggaaggattctgtagccctaaaccgtctgaaattaaagatttttcttatgtctataagcccgaaaattgtcaagttctagtaggatgttccatgtttgcacctttaaaaactctaccaagccattgtctgcctcctatcaaattgccagaagagtgtgtttaccggcagagctggactgttggaaaattggacttgcttccttcaggcccttcaatgccattcatcaaggagggtgatggcagtaatttggatcaggactatggccccgcctacacaccgcaaacccatgcttcttttgggatgcctccgagcagcgcacctcctagtaatggtggtgcaggaattcttccttccccatccacccctaggtttccaactccaaggactccaaggactccaaggacccctcgtggggctggtgggcctgctagtgctcaaggttcagtcaagtatgagaattcagacttgtattcaccagcttccaccccatctacatgccgacccctcaattctgttgaacctgcaactgttccttccatccctgaagcgcacagtctttatgtaaacctcatcctttcagaatcagtaatgaatttgtttaaagactgtaattttgatagttgctgtatttgtgtctgcaatatgaatatcaagggtgccgatgttggagtttacattccagacccaacccaagaagcacagtatcggtgcacctgtggcttcagtgctgtcatgaaccgaaaatttggaaataattcaggattatttcttgaagatgaacttgacatcataggacgtaacacagactgtgggaaagaagcagaaaaacgttttgaagctctcagggcttcctctgtggagaatgttaatggaggcctgaaggaatctgaaaaggtgcctgatgaattaatattactgctacaagatcaatgcactaatttattttcaccctttggagcagcagaccaagatccttttcccaaagtgggtataagtagcaattgggtgcgtgttgaggagcgggactgttgtagtgactgctgcctcgccttagaacatgggcgtcagttcatggataatatgtcaggagggaaagttgatgaagcacttgtcagaagctcatgcttacatccgtgggccaagcaaaatgatgcgagcgtgcagtgttcacaggatatacttcggatgctcctttctcttcagccagttcttcaagatgctattcagaaaaaaagaacagtgaggccttggggtgttcaaggtcctctcacatggcaacaatttcataaaatggctggccgaggctcttatggaactgatgaatctccggaaccactgccgattcccacgtttttgttgggttatgattacgattttctggtgctttctccatttgctctcccttactgggagaaacttatgctggaaccctatggatctcaaagagatatagcctatgttgtactctgtccagagaatgaagctttgttaaatggagccagaagcttttttagagatctcactgcaatatatgagtcctgtcgattaggccaacacagacctatttctcgattgttgacggatgggatcatgaaagtgggagctactgcatcaaagaaactttcagaaaagtttgtaacagaatggttttctcaggcagctgatggtaacaatgaagcattttccaaattgaagctgtatgcacaagtctgcagatatgatttaggtccatatcttgcttctcagccgttggacagctctctgctctcccagccaaatttagttgcccctccaaatcagtctttggttactgcacctcagatgacaaatactggaaacgctaatgctccatctgccaccttagcatctgcggcaagtagcactatgacaatgacttcaggtgttcccatatctacttcagttgccacagctaattcaactttgaccacaacttcatcttcatcatcttccagtctgagtagtggagtatcatcaaataaactgccttcgtttccaccctttggcagtatgaacactagtggtacaggatccatgtctgcacaagcaagtacggttcagagtggccagctaggaggacagcagtcgtcatctctgcaggcagcaggaatatcaggggagtcagcttctcttcccactcagccacatcctgatgtgtctgaaagcacaatggatcgtgataaagtggggattcccacagatggtgattcacatgcaattacctaccctcctgcaattgttgtttatataatcgatccttttacatatgaaaataaagacgagagcactaactcttctaatgtatggactttggggctccttcgatgcttcttggaaatggtccaaactcttcctcctcatatcaagagcactgtttctgtgcagattgttccttgtcagtacctgttacaacctgtgaaacacgacgacagacagatctactcccagcatttaaaatctttggctttttcggtgtttacccagtgtcggagaccacttccaacatcaaccaatgtaaaaacactgactgggtttggtccaggcttagctatggaaactgctcttaaaagtcctgatagaccagagtgtattcgactttatacaccaccttttattctggctccggtgaaggacaaacaaacagagctaggagagacctttggagaagctggacagaaatacaatgttctttttgtgggctactgtttatcacatgatcaaaggtggattcttgcatcttgcacagatctatatggagaactcctagaaacatgtatcattaacatcgatgttccaaatagggcccgtcggaaaaagggttctgctagaagatttggtctacagaaactgtgggagtggtgcttgggacttgttcagatgagctctttaccatggagagttgtgattggtcgcctgggaaggattggacatggagagttgaaagattggagttgtttgctgagtcgtcgaaacttgcaatctctaagcaaaaggctcaaagacatgtgtaggatgtgtggcatatctgctgcagactctccaagtatccttagtgcttgtttggttgcaatggaaccccaaggttcttttgttatcatgccagattctgtgtcaactggttctgtttttggaagaagtaccactctaaatatgcagacgcctcagctaaataccccacaagatacatcctgtactcatatacttgtgttccctacttctgcttctgtgcaagtagcttcagctacttacaccactgaaaatttggatttagctttcaatcccaacaatgatggagcagacggaatgggtatctttgatttattagacacaggagatgatcttgatcctgatatcattaatatccttcctgcatctccaactgcatctcctgtacattctccaggctctcattacccccatggaggtgatgctggcaagggtcagggtactgatcggctactttcaacagaatcgcatgatgaagtaactaatattcttcaacaaccattggcccttggatactttgtatcaactgccaaagcgggtccattacctgactggttctggtcagcatgccctcaagcacaatatcaatgccccctttttcttaaggcctctttgcacctccacgtgccttcagtgcaatctgacgagctgcttcacagcaaacactcccacccactggactcaaatcagacttcagatgtcctcaggtttgttttggaacagtacaatgcactctcatggctaacctgtgaccctgcagtccaggacagacgctcatgtctcccagttcattttgtggtgctgaatcagttatataacttcatcatgaatatgctgtgatcctcgtttgatggaattacgcaaggaaagaacgggaagaaaggatattttgctgcaagattaagttacagttctcagtggaagtcatttgtgatggggtctaattcttattacttcaacaaatattgttttgacttggggggcggggctataaccctatttttcattgactttactgagctctttaggatgatgactgattattcaaaacgtattataacactttcgtagcaaaaattaaccttttttttccagtcacagtatttgtgaaaagtaatgagccatagtacccattaatgttaaagaatattaaagcatggagaggaacatgaggaacaatgaattccaacatatggctttagaacatcaggatgttcttgtattggatatagtatctagtattcaaaaatgcctgcatctcttatttattgtaagtttttaaatgtataaattgtcttatatttcttaacctcttttataaaaattttcctagaaggtttatactgccttcttgctttaaagcaattggtctaaaatatatgtaatcgtcttaattaaaacgttgcagtagggttgcttttagagtattatttttttgtaagggggtggggtggacagtaaatttgtattgtctcaatgtacagtttaacagggatagaggggaaataatgtccatgccattgtgtgtggaagatttacagctaagctgtagttgcagagtacatgtacagtaatgaagttcactgtgtttataaactgaaaaggtaccgggtcttacagcattttatatatcacacctttacagaataacatgatggcaatatacatacgtgatattgttaggtggaataacttagaataaaatgagaattcttgagttatattttgtactatggtttagggctatgactaatatttcaggccatttccagtgaaagaaacttagttttacaagaaaacatttgctactgaatgcttacactaatcttggtgtttaatgttacatgcttaaattcttttcagttttcacagtggcacatttaggcatggggatagtactaattatgaaatttcctgcaggatctgttctaaggttgaaatttagcccagctctaggcattttacaaattattttaagaacagtcactcttgattgttttactttttatttttaaattaaagattgggaatgcgtgtgagagtatgcataagcatggcaggaagagaggggggagagagaaagagagagagagtgagaaagaaagagagagtgagagtgtgtgtgtatatgtgtgtgtgtgtgcaatcaaactgtggtgtaaatagatcctcagtgaattctggtattcagactctgttccactagtgaatgaaccattttctaaacgtttccctttgacttttttatttattgaattttcttggtttggagatggcagtcccaaacaccagagtctgtacttttctatgacacagctcaaattaaagtagggcacatgccaaggaggttctcacctccctaaagaagggacttgaattttagggactttaattcaccctttccttcaatccagctttcccccttcttgtttgcacatgccaagataactgcttttatgcaggctttacccctgaaaaactcctttctacagtgctgctcacgagagcccagccagtctcatgcctgcattgctgacttgaactcacagtcgccaagtctacctatctttcttggaagcagtctttcaaaattcctacttgtatattcatccattgttgacaaggacaaaatcagttgtatttacaaaactcttaactcggtattttttttttaaactgaatcctgttttgtaaataatatacatttaatgttgcttagcataaaaaatactttcttacagtaatcttctttaaattgggtatatgaaaacattaccaactcttgtttttctataaagaaatacagttaataacaaggtttcaaattattcctttaacattaatagaacaatccaaatgttgagcatattttgatattaaactaaagatcacgtctctgtttttaaattatgctaacaccaccacagattatgttgacgtattttcttctgtattttcttggtgggacttgagatttgaggaaaaaagatgcttatttggaatttctattaagaactatccttgttattttcttagctcaataattactcaagaaaaataaaagattataatctcagtttaaaattactaatgtgtgacaaccatacctcagtttgaaatagatttaacaagattattccctgacattttcttccatgtagccataagcagggacccagcatacaattcttcttacctaggaatcaggaactagtcccaaatatacaggattgagtcatggtttgctttttttttttttcctttcctttttttctcccctttacacatcagattttgctcaaataggaggtaactaaatagccattagaagaagaagtgaagcctttcatgcaggatgatagatctaacttatcaatgtactgtcacagtacattaatcgttttatttgagtaggtaaacaaatttgcacacttttccccagtgaattcccaacaccttgacttcctcatttcagtgctaataacctgttttgtgtgcagttaatccattctgaagcaggtgaaaggtcagtattttagcattttaaaagatgagttatataatgtctgcttccagccagtctgcaacatctagccatacctttcttatgcaagccattcagttatcaggactgtgaattaacactgtatgaatacatttctgtacaccttattgtttggccagagggccaccaagtgtacttatatgtaatccttaaattttaaactagcttgtgatttttaaatatttctaaacttttcttaaaccactaaaattaagctcttactacttagtcaactatcctcagctgtattcgtcttcaattgtcagtatggcacagatcactgtattaaaatgctctttcgtcttcatatttaccttctgaggtcattttttaacttaatgtgttactacaaagatttgcagatctttaatcaagcactatgttaatactgtaatatcaaaatactatgtcgaattatttcagatgttcagattgaatagggtaaaagaaagtctttaaatgctatcgcatcctagaccctcttcccacctactatggcattgcatattagtctgttgagacattcattgttgcttgactgacattttggtctgggttttcttttaatattttattttaattaaaattaggaaaaaatgtgttcaacaattttttttttgtcccatcttctccaaatcagtgggaaaagcttaccttttggtatatcttagtgttttcatgggcccagaactgtggtttaaatttttatatgtattctcattctcatattcactcatactcactctttttctctctctccctctctctccctctctcccccccccttctcttttgtggagtataaattaaaaaaactggatttgggacctacaatactcctcaggttgagatattcttgaagttttaaaatagctttagtttttaaagtaaactggatttgtggaccttaaagttactgagtttaaactacaaattgtaacatcattactgaacatgtccgcatcaaccctctgagaataacttggtcactttatgaaggggcgtttttaagttgtttagcagtgacatttaatatggtccaattgcttttctttttaacatgacaaacaattttaaaagagactaaggaacaaacactattgcgccgaatgccataacactgagttgtacaaattgtgattgaggagatgaaaaagtttatactttttaaaaaaaaaaaaaacaaaaaacaaaacttcaaatggaataaattattcatgaagccttc

SEQ ID NO: 890 - DNA, 19 bp, synthetic construct
  misc_feature 1..19: note = Synthetic
  source 1..19: mol_type = other DNA
accttattcaccatgactt

SEQ ID NO: 891 - DNA, 19 bp, synthetic construct
  misc_feature 1..19: note = Synthetic
  source 1..19: mol_type = other DNA
aagagatcctgctatgtct

SEQ ID NO: 892 - DNA, 19 bp, synthetic construct
  misc_feature 1..19: note = Synthetic
  source 1..19: mol_type = other DNA
gtcaaattttcttcagtat

SEQ ID NO: 893 - DNA, 19 bp, synthetic construct
  misc_feature 1..19: note = Synthetic
  source 1..19: mol_type = other DNA
acaagaacctaaaattgat

SEQ ID NO: 894 - DNA, 19 bp, synthetic construct
  misc_feature 1..19: note = Synthetic
  source 1..19: mol_type = other DNA
agaagatgctatgtcatta

SEQ ID NO: 895 - DNA, 19 bp, synthetic construct
  misc_feature 1..19: note = Synthetic
  source 1..19: mol_type = other DNA
tgctagtgctcaaggttca

SEQ ID NO: 896 - DNA, 19 bp, synthetic construct
  misc_feature 1..19: note = Synthetic
  source 1..19: mol_type = other DNA
acaatttcataaaatggct

SEQ ID NO: 897 - DNA, 19 bp, synthetic construct
  misc_feature 1..19: note = Synthetic
  source 1..19: mol_type = other DNA
gccagattctgtgtcaact

SEQ ID NO: 898 - DNA, 19 bp, synthetic construct
  misc_feature 1..19: note = Synthetic
  source 1..19: mol_type = other DNA
cacgtgccttcagtgcaat

SEQ ID NO: 899 - DNA, 19 bp, synthetic construct
  misc_feature 1..19: note = Synthetic
  source 1..19: mol_type = other DNA
atcagacttcagatgtcct

SEQ ID NO: 900 - DNA, 19 bp, synthetic construct
  misc_feature 1..19: note = Synthetic
  source 1..19: mol_type = other DNA
aacaaatattgttttgact

SEQ ID NO: 901 - DNA, 19 bp, synthetic construct
  misc_feature 1..19: note = Synthetic
  source 1..19: mol_type = other DNA
taaatgtataaattgtctt

SEQ ID NO: 902 - DNA, 19 bp, synthetic construct
  misc_feature 1..19: note = Synthetic
  source 1..19: mol_type = other DNA
gtcttatatttcttaacct

SEQ ID NO: 903 - DNA, 19 bp, synthetic construct
  misc_feature 1..19: note = Synthetic
  source 1..19: mol_type = other DNA
aaattttcctagaaggttt

SEQ ID NO: 904 - DNA, 19 bp, synthetic construct
  misc_feature 1..19: note = Synthetic
  source 1..19: mol_type = other DNA
ctaaaatatatgtaatcgt

SEQ ID NO: 905 - DNA, 19 bp, synthetic construct
  misc_feature 1..19: note = Synthetic
  source 1..19: mol_type = other DNA
caaggatgatccagttgga

SEQ ID NO: 906 - DNA, 19 bp, synthetic construct
  misc_feature 1..19: note = Synthetic
  source 1..19: mol_type = other DNA
ttgtggtgctgaatcagtt

SEQ ID NO: 907 - DNA, 19 bp, synthetic construct
  misc_feature 1..19: note = Synthetic
  source 1..19: mol_type = other DNA
gaagagaattgtggatatt

SEQ ID NO: 908 - DNA, 19 bp, synthetic construct
  misc_feature 1..19: note = Synthetic
  source 1..19: mol_type = other DNA
gcggcgagatcaaagacct

SEQ ID NO: 909 - DNA, 19 bp, synthetic construct
  misc_feature 1..19: note = Synthetic
  source 1..19: mol_type = other DNA
ccaaagacttgtgatctct

SEQ ID NO: 910 - DNA, 19 bp, synthetic construct
  misc_feature 1..19: note = Synthetic
  source 1..19: mol_type = other DNA
gagatatagcctatgttgt

SEQ ID NO: 911 - DNA, 19 bp, synthetic construct
  misc_feature 1..19: note = Synthetic
  source 1..19: mol_type = other DNA
agcaaatcatgtggtggat

SEQ ID NO: 912 - DNA, 19 bp, synthetic construct
  misc_feature 1..19: note = Synthetic
  source 1..19: mol_type = other DNA
ccgaggctcttatggaact

SEQ ID NO: 913 - DNA, 19 bp, synthetic construct
  misc_feature 1..19: note = Synthetic
  source 1..19: mol_type = other DNA
actgtttatcacatgatca

SEQ ID NO: 914 - RNA, 21 nt, synthetic construct
  misc_feature 1..21: note = Synthetic
  source 1..21: mol_type = other RNA
tgaccttattcaccatgactt

SEQ ID NO: 915 - RNA, 21 nt, synthetic construct
  misc_feature 1..21: note = Synthetic
  source 1..21: mol_type = other RNA
acaagagatcctgctatgtct

SEQ ID NO: 916 - RNA, 21 nt, synthetic construct
  misc_feature 1..21: note = Synthetic
  source 1..21: mol_type = other RNA
gggtcaaattttcttcagtat

SEQ ID NO: 917 - RNA, 21 nt, synthetic construct
  misc_feature 1..21: note = Synthetic
  source 1..21: mol_type = other RNA
gaacaagaacctaaaattgat

SEQ ID NO: 918 - RNA, 21 nt, synthetic construct
  misc_feature 1..21: note = Synthetic
  source 1..21: mol_type = other RNA
gaagaagatgctatgtcatta

SEQ ID NO: 919 - RNA, 21 nt, synthetic construct
  misc_feature 1..21: note = Synthetic
  source 1..21: mol_type = other RNA
cctgctagtgctcaaggttca

SEQ ID NO: 920 - RNA, 21 nt, synthetic construct
  misc_feature 1..21: note = Synthetic
  source 1..21: mol_type = other RNA
caacaatttcataaaatggct

SEQ ID NO: 921 - RNA, 21 nt, synthetic construct
  misc_feature 1..21: note = Synthetic
  source 1..21: mol_type = other RNA
atgccagattctgtgtcaact

SEQ ID NO: 922 - RNA, 21 nt, synthetic construct
  misc_feature 1..21: note = Synthetic
  source 1..21: mol_type = other RNA
tccacgtgccttcagtgcaat

SEQ ID NO: 923 - RNA, 21 nt, synthetic construct
  misc_feature 1..21: note = Synthetic
  source 1..21: mol_type = other RNA
aaatcagacttcagatgtcct

SEQ ID NO: 924 - RNA, 21 nt, synthetic construct
  misc_feature 1..21: note = Synthetic
  source 1..21: mol_type = other RNA
tcaacaaatattgttttgact

SEQ ID NO: 925 - RNA, 21 nt, synthetic construct
  misc_feature 1..21: note = Synthetic
  source 1..21: mol_type = other RNA
tttaaatgtataaattgtctt

SEQ ID NO: 926 - RNA, 21 nt, synthetic construct
  misc_feature 1..21: note = Synthetic
  source 1..21: mol_type = other RNA
ttgtcttatatttcttaacct

SEQ ID NO: 927 - RNA, 21 nt, synthetic construct
  misc_feature 1..21: note = Synthetic
  source 1..21: mol_type = other RNA
aaaaattttcctagaaggttt

SEQ ID NO: 928 - RNA, 21 nt, synthetic construct
  misc_feature 1..21: note = Synthetic
  source 1..21: mol_type = other RNA
gtctaaaatatatgtaatcgt

SEQ ID NO: 929 - RNA, 21 nt, synthetic construct
  misc_feature 1..21: note = Synthetic
  source 1..21: mol_type = other RNA
ttcaaggatgatccagttgga

SEQ ID NO: 930 - RNA, 21 nt, synthetic construct
  misc_feature 1..21: note = Synthetic
  source 1..21: mol_type = other RNA
ttttgtggtgctgaatcagtt

SEQ ID NO: 931 - RNA, 21 nt, synthetic construct
  misc_feature 1..21: note = Synthetic
  source 1..21: mol_type = other RNA
aagaagagaattgtggatatt

SEQ ID NO: 932 - RNA, 21 nt, synthetic construct
  misc_feature 1..21: note = Synthetic
  source 1..21: mol_type = other RNA
tggcggcgagatcaaagacct

SEQ ID NO: 933 - RNA, 21 nt, synthetic construct
  misc_feature 1..21: note = Synthetic
  source 1..21: mol_type = other RNA
agccaaagacttgtgatctct

SEQ ID NO: 934 - RNA, 21 nt, synthetic construct
  misc_feature 1..21: note = Synthetic
  source 1..21: mol_type = other RNA
aagagatatagcctatgttgt

SEQ ID NO: 935 - RNA, 21 nt, synthetic construct
  misc_feature 1..21: note = Synthetic
  source 1..21: mol_type = other RNA
ttagcaaatcatgtggtggat

SEQ ID NO: 936 - RNA, 21 nt, synthetic construct
  misc_feature 1..21: note = Synthetic
  source 1..21: mol_type = other RNA
ggccgaggctcttatggaact

SEQ ID NO: 937 - RNA, 21 nt, synthetic construct
  misc_feature 1..21: note = Synthetic
  source 1..21: mol_type = other RNA
atactgtttatcacatgatca

SEQ ID NO: 938 - RNA, 23 nt, synthetic construct
  misc_feature 1..23: note = Synthetic
  source 1..23: mol_type = other RNA
aagtcatggtgaataaggtcagc

SEQ ID NO: 939 - RNA, 23 nt, synthetic construct
  misc_feature 1..23: note = Synthetic
  source 1..23: mol_type = other RNA
agacatagcaggatctcttgtgg

SEQ ID NO: 940 - RNA, 23 nt, synthetic construct
  misc_feature 1..23: note = Synthetic
  source 1..23: mol_type = other RNA
atactgaagaaaatttgacccac

SEQ ID NO: 941 - RNA, 23 nt, synthetic construct
  misc_feature 1..23: note = Synthetic
  source 1..23: mol_type = other RNA
atcaattttaggttcttgttctg

SEQ ID NO: 942 - RNA, 23 nt, synthetic construct
  misc_feature 1..23: note = Synthetic
  source 1..23: mol_type = other RNA
taatgacatagcatcttcttcat

SEQ ID NO: 943 - RNA, 23 nt, synthetic construct
  misc_feature 1..23: note = Synthetic
  source 1..23: mol_type = other RNA
tgaaccttgagcactagcaggtc

SEQ ID NO: 944 - RNA, 23 nt, synthetic construct
  misc_feature 1..23: note = Synthetic
  source 1..23: mol_type = other RNA
agccattttatgaaattgttgcc

SEQ ID NO: 945 - RNA, 23 nt, synthetic construct
  misc_feature 1..23: note = Synthetic
  source 1..23: mol_type = other RNA
agttgacacagaatctggcataa

SEQ ID NO: 946 - RNA, 23 nt, synthetic construct
  misc_feature 1..23: note = Synthetic
  source 1..23: mol_type = other RNA
attgcactgaaggcacgtggagg

SEQ ID NO: 947 - RNA, 23 nt, synthetic construct
  misc_feature 1..23: note = Synthetic
  source 1..23: mol_type = other RNA
aggacatctgaagtctgatttga

SEQ ID NO: 948 - RNA, 23 nt, synthetic construct
  misc_feature 1..23: note = Synthetic
  source 1..23: mol_type = other RNA
agtcaaaacaatatttgttgaag

SEQ ID NO: 949 - RNA, 23 nt, synthetic construct
  misc_feature 1..23: note = Synthetic
  source 1..23: mol_type = other RNA
aagacaatttatacatttaaaaa

SEQ ID NO: 950 - RNA, 23 nt, synthetic construct
  misc_feature 1..23: note = Synthetic
  source 1..23: mol_type = other RNA
aggttaagaaatataagacaatt

SEQ ID NO: 951 - RNA, 23 nt, synthetic construct
  misc_feature 1..23: note = Synthetic
  source 1..23: mol_type = other RNA
aaaccttctaggaaaatttttat

SEQ ID NO: 952 - RNA, 23 nt, synthetic construct
  misc_feature 1..23: note = Synthetic
  source 1..23: mol_type = other RNA
acgattacatatattttagacca

SEQ ID NO: 953 - RNA, 23 nt, synthetic construct
  misc_feature 1..23: note = Synthetic
  source 1..23: mol_type = other RNA
tccaactggatcatccttgaatt

SEQ ID NO: 954 - RNA, 23 nt, synthetic construct
  misc_feature 1..23: note = Synthetic
  source 1..23: mol_type = other RNA
aactgattcagcaccacaaaatg

SEQ ID NO: 955 - RNA, 23 nt, synthetic construct
  misc_feature 1..23: note = Synthetic
  source 1..23: mol_type = other RNA
aatatccacaattctcttcttcc

SEQ ID NO: 956 - RNA, 23 nt, synthetic construct
  misc_feature 1..23: note = Synthetic
  source 1..23: mol_type = other RNA
aggtctttgatctcgccgccaaa

SEQ ID NO: 957 - RNA, 23 nt, synthetic construct
  misc_feature 1..23: note = Synthetic
  source 1..23: mol_type = other RNA
agagatcacaagtctttggctgg

SEQ ID NO: 958 - RNA, 23 nt, synthetic construct
  misc_feature 1..23: note = Synthetic
  source 1..23: mol_type = other RNA
acaacataggctatatctctttg

SEQ ID NO: 959 - RNA, 23 nt, synthetic construct
  misc_feature 1..23: note = Synthetic
  source 1..23: mol_type = other RNA
atccaccacatgatttgctaatt

SEQ ID NO: 960 - RNA, 23 nt, synthetic construct
  misc_feature 1..23: note = Synthetic
  source 1..23: mol_type = other RNA
agttccataagagcctcggccag

SEQ ID NO: 961 - RNA, 23 nt, synthetic construct
  misc_feature 1..23: note = Synthetic
  source 1..23: mol_type = other RNA
tgatcatgtgataaacagtatcc

SEQ ID NO: 962 - DNA, 4328 bp, Homo sapiens
  source 1..4328: mol_type = genomic DNA
atcagagagcccaatggagccttctgaagtacctagtcagattagcaaagataattttttagaagttcctaatttatctgactctctttgtgaagatgaagaagttactttccaacctggtttctcccctcaaccaagtagacgaggttctgattcttctgaagacatatacctggataccccatcttcaggtactagaagagtttcatttgctgattcctttggattcaatcttgtgtctgttaaagaatttgattgctgggaattaccgagtgcttcaaccacttttgacttagggacggacattttccacacagaagaatatgttttagccccactgtttgacttgccttcttcaaaagaagatcttatgcaacaactccaaatacagaaagcaatactggagtcaactgagtctcttcttgggtctacaagtatcaagggtattattcgagttttgaatgtttcttttgagaagttagtatatgtaagaatgtctttagatgactggcagacacattatgacattttagcagaatatgttcctaattcatgtgatggtgaaactgaccagttctcctttaagattgtattggttcctccttatcaaaaagatggcagtaaagttgagttttgtatacgttatgaaacttctgttggtacattttggtcaaataataatggcacaaattatacattcatttgtcaaaagaaagaacaagagccggagcctgtaaaaccatggaaagaagttcctaacagacaaataaaaggctgcttaaaggtaaaatcaagtaaagaagaatcatcagtaacatcagaagaaaataactttgagaatccaaagaatacagatacctatatcccaacaatcatttgttctcatgaggacaaggaagatttggaagccagtaatcgaaatgtaaaagatgtaaacagggaacatgatgaacataatgaaaaagaattagagttgatgataaatcaacacttaataagaaccagaagtactgcttccagagatgaaaggaatacattttcaacagatccagtcaattttccaaataaagcagaggggttagagaagaagcaaatccatggtgaaatatgtactgacttgttccaaaggtctctgtctccaagttcatcagcagaaagctccgtaaagggagatttttactgcaatgaaaaatattcctcaggagatgactgtacacatcaaccttcagaggaaactacttcaaatatgggagaaatcaagccatcattgggagatactagtagtgatgaactagtgcaattacatactggcagcaaagaagtcctggatgataatgctaatccagcccatggcaatggcacagtgcaaataccttgcccctcttcagatcaactaatggcaggaaaccttaataaaaaacatgaaggaggagctaaaaatattgaagtaaaagatttgggatgtttacgaagagatttccattcagatacgtcggcatgtctcaaagaatcaacagaagaaggatcttctaaggaagattattatggcaatggtaaggatgatgaagaacaaagaatatatttaggtgttaatgaaaaacaaagaaaaaatttccaaacaatcttacatgaccaagaaaggaagatgggtaaccctaaaataagtgtggcagggattggagctagtaacagagacctggctactctgctgagcgaacataccgcaatccccacccgggcaatcacagcagatgtgtctcattcaccaaggacaaatttaagttgggaagaagctgtgttaaccccagagcatcatcatttgactagtgaaggcagcgctttaggagggataactggtcaagtttgttcatcaagaactggaaatgttttgaggaatgattatcttttccaagttgaagaaaaatcaggtgggattaattctgaagatcaggataatagcccacagcataaacaaagttggaatgttctggaaagtcagggaaaatcaagagagaataagacaaacataacagagcatatcaaaggacaaacagattgtgaagacgtgtggggaaaaagagataatacgaggagtttgaaagctactacagaagaattgtttacctgccaagaaacagtgtgctgtgaactgtcttctctagctgatcatggcattactgagaaagcagaagctggtacagcctatataattaagacaacatcagaaagtactccagaaagcatgtctgctagagaaaaagcaataattgctaagctacctcaagagacagcacgaagtgacaggcccatcgaggtaaaggaaacagcgtttgatccacatgaagggagaaatgatgattcacattataccctttgtcaacgagatacagtaggtgtaatctatgacaatgattttgaaaaggaatcacgtttaggtatttgtaatgtacgtgtagatgaaatggagaaggaagaaaccatgtctatgtacaatcctaggaagacacatgacagggagaaatgtggcactggaaatataacatctgtggaagaatcctcatgggtcattacagaatatcaaaaagcaacttcaaaactggatttacagttgggaatgttaccaacagacaaaactgtattttcagaaaacagagatcttaggcaggttcaagaattatcaaagaaaacagactcggatgccattgtgcattctgcttttaactcagacactaatagagctcctcagaatagctctcctttttccaaacatcatactgaaatttcagtgtcaactaatgagcaggcaattgctgtagagaatgcagttactaccatggctagccaacctatttctacgaaatcagaaaatatttgtaattcaacaagagaaatccagggtattgagaagcacccttatcctgagtctaaacctgaagaagtttccagaagttcaggaatagtgacatcaggtagtagaaaagaaagatgcataggccagattttccaaacagaagagtatagtgtggaaaaatctctagggccaatgattttaatcaacaaacctcttgagaatatggaagaagcaaggcatgaaaatgaaggattagtaagctctgggcaatcactatacacttcaggtgaaaaggaatctgacagctctgcttctactagtcttcctgttgaggaaagtcaagctcaaggcaacgaatctttgttttcaaaatataccaactctaaaataccttatttccttttgtttctgatatttcttataactgtctaccattatgacttaatgattggcttgacattctacgttttgtcattgtcctggctatcctgggaagagggtagacaaaaagagtctgtcaaaaagaagtaacctcagcactactattctctcttaaaagataagctatttaaccccaaacatttggattggtgaatgggactattcattgttcaaagatccagtgcagtttttctcttgaaggatcatttaaaaagggacgcgaataagtttgctccttcatataagtaattattctatataggaccattatgtttggatcattaaatacctatatgaatatgagatctgaagcacgtcaagttgaaattaggtacagctgttgctccttagcaggctatgaagttgcaatgcttcacatctcttcactacttaaagtgctatttcttgcattcatttctcttgcaataaagcttcatttttttttccccttgagagtatatattttcccctacggttttaaaaaacagataaaacatggacaatggcagaggacttttttggtcttttagtattgaacatgaaatttgttcaatttatcatttatcaggattcattgatcaaatatttcaacctttcatatttttaagaaaacacccatatatattgaaatgcaaacttaaacatattctgttcacttgagtgtaatacttgatgcatgcacacacacacacacataccttctttatagctacaaagtcagggcgttcataggcaaaatctgacaagactgaaacaattgggagattatctttcaattctgaaaaattctgtgggtggcctgtctttaagcaatgcttttctcttgtgagggaagactgtaacacagctgaactatttcagtgtcaactattcagaattgaaaatgtaaattaaaatttccacaagcattgcttcagaatgaatttgtacctataaagcataaggcattaaatgacaataaaaattccaaatggactatttgttccacattgtatttttgtcttcaaatattttctaagagaatgaattatccccc

SEQ ID NO: 963 - DNA, 7120 bp, Mus musculus
  source 1..7120: mol_type = genomic DNA
actcttatttgataaatcagagagaccaatggagcccgctgaagaacctggtcagattagcaaagataactttttagaagttcctaatctgtctgattctgtgtgtgaggatgaagaagttaaggcgaccttcaagcctggcttctcccctcagccaagcagacgcgggtcaggatcttcggaagacatgtatctggacactccaacctcagcttcccggagagtttcctttgctgacagcctgggattcagccttgtgtctgttaaagaatttgattgctgggaactacccagtgtttcaactgattttgacttaagtggggatgttttccacacagatgaatatgttttatctccactgtttgacttgccttcttcaaaagaaaagcttatggaacaactccaagtccagaaagccgtgctggagtccgctgaacaccttcccgggtcaagcatgaagggcattattcgagtcctgaacatttcttttgagaagttagtgtatgtgcgcatgtctttggatgactggcagacacattatgacattttagcagaatatgttcctaactcgtgcgacggtgagactgaccaattctcttttaagatttcattggttccaccttatcaaaaagagggcggtaaagtggagttttgtatacgctatgaaacttctgctggcacattttggtcaaataataatggcacaaattatatattggtttgtcaaaagaagaggaaggagccagagcctgtaaagccattggaagaagcacctagcagacaaataaaaggctgcttaaaggtaaaatcacgcagtaaagaagaaccattgctagcaccagaagaaaataaatttgagactttaaagttcacagagtcctacatcccaacaatcatttgttctcacgaggacaaggatgacttgggagccaatcatccaaatgtagacgatatcaacaagaagcatgacgaacacaatggaaaggagctagacttgatgataaaccaacggttaataacttcccaggatgaaaagaatacatttgcaacagatacagtcaattttacaaataaagctgaagggtcagagaagaagcaagcttaccatgaaatcaacactgacttgttcatggggcctttgtctccaagtttatcagcagaaagttccttaaagcgagatttctatcatagcagaagttcttccccaggaaatgaatatggtcatccacattcagaagaaattatttcagatatgggagaaaaaggtccatcactgggagacactagttctgatgagttaatgcaattggaactctgcagcaaggaagacctggatgataatgccaacccagccaatgggagtggcagagtgtgctcttccttcgatcaaagaatggcatgtggtctcaagaataatgaagcaggaatcaagaaaactggaatacaagattacaaatattcacatggagattccacaaaattggaagagtcaaatgcatcttccagagatgattatgccaaagtcgataataaaaaggagaagcaaacatgcttaggtgttaatgaaaacccaagcaagaattttcaatcagtattccagacccaagagggacacatggggtacccaaaaataagcactgaaggggataaagctaataaccaagacttgacaagtctactgagcaaagatattacagctaacacctgggcggtgacagtggatccctgtccttccacaaatgcaaaaaggagttggagagaagttggaagtggtagcaatttagaaccaggaactagtgatcttagttctccaaggaatttcagccctctgactgatgatcatctttttcaagctgacagggaaaactcagactctagcaatcctgaaaatcagaatatgaacacacgacatagaaaaaaatggaacgttctggaaacccagtcagaaacaagtgagactgaatcagatatagccaagcataccaaagaacaagcagagtataaagacatgtgggaaaaaacagataacagtaggaatctgaaagctactcctacagaacacttgtttacctgccgagagacagaatgctacggactgtcttctcttgctgatcatggtattactgagaaagcacaagcagttacagcttatataattaagacaacattagaaagtactccagaaagcgcgtctgctagaggaaaagcaataattgctaagctacctcaagagacagcaggaaatgacaggcccatcgaggtaaaagaaacagcgtttgatccacatgaagggaggaaagatgattcacattattccctttgtcatggagatacagcaggtgtaatccatgacaatgattttgaaagggagtcacatttagatatttgtaatttacgtgtggatgaaatgaagaaggagaaaaccacatctacgtgctttcctcagaagacatatgacaaggagaaacatggaattggaagtgtaacatctatagacgaaccttcacaggtcattacaggcaatcaaaaagctacgtcaaaactggatttacatttgggagtgttaccaacagacagagcaatattccaagcaaatgcagatcttgagctgcttcaagaattatcaaggagaacagacttcaacgccgttccctctgcatttaactcagacactgccagcgcttctcgggacagctctcaagtttacagacactgctctaaaaaatcagtaccttcttacggtgaagagaaagcagttactaacacaaccctccagtctattcctaccaaatcagaatataattggcacccagaaagtgaggtcttgggccatgccatgtctaaacctgaagatgttttcaaaagttcagaaataatgaaatcaggtagtggaggagaacgaggcgggggtccgattctccaacaaaaagaaggtagcttggaaaactcccagggcccgatgttttttaccaatgagcctcttgagaatctggatgaagcaagttctgaaaatgaagggttaatgcattctggacagtcacagtgttatctgggtgacaaaggattagtgagctctgcttctgctactgtctctacgcaggaactcgaagctcaaggcagggagtctctgctttcaatatccaccaactctaaaataccatatttccttttgtttctgatatttcttgcaactgtctactactatgacttaatgataggcttggcgttctaccttttttcattatactggttgtactgggaaggggggaggcaaagagagtctgttaagaaaaagtgagcttggcacagttgctattctctcttgaaagataagctatttagtcccaaacatttggaatggcaggagagactattcattgttcaaagaatcagtgcagtttttctcttgaaggatcatttaaaaaggaatgcgtatgaagtttgctccttcatataagtaattattctatataggaccattatgcttggatcattaaatacctatatgaatatgagatgtgaagcacgtcaagttggaattaggtacagctgttgctccttagcaggctgtgaagttgaaatgcttcatgtctcttcactatttaaagtgcgatttcctgcaatcatttctttcacagtaaagctttggatattttttttccctgagagcactttcctcctaggtttttaaaaaaatagataaaacatggagagatattttttcttttagtccctagaatttgccatgaaaatttcatttagcactgtgtactctatcagcacatattgatagatcaaatattaaaatttctgtttatgcctttaagaaaatacccatgtactttgcaatatgaaaacgtaaattggaaatatgttttatgcacactcacattatactttatgtgcataccattgtatctctttgtacccatgatgtcagggttttcatacaccaattttaactttgtttgtttatttttatttagttgaatgtgtagactgtaacacaaatggacaattttaatgttaagtgttgtccagacatgaaaattctaacattctatcatcattgtttcaaggtgattttgcacctaccttgtagttcttaacctgtgggttacaacccctttggaggctgcatatcagatatttatgttatcattcacaacagtgagcagaattacagttatgaagtataaacaaaacaaacttatggctggggtcaccacaacatgtggcactctattaaagggtcacaacattaaaaaggttgagaaccactgctatagaacataaggccttaagtaataatataatagatgctaaaatggtttgttcttcctggtagttcctttgttttcgattagttgttaatattttcttatagtagggagatgaattttatcctaagtaaatttacagaacaaactccttgtctggtaatatccattttgtcatctttgggttatgagacaatcactcaaaactttaagcaggcaaaatatgtatagttgaaagcatactgaaaacgaagtgaacatagactatagcagtgatttggctactgtaattataggtaaaggtataaaataatggagcattttttagttaaatggaaatactgtcaagatttatacaaaatttatttcagcaattttattgaataattgtaatatacaaagccctgtgctattctatgggggtccttagataaactgagtatatcgatccctgtatatagcaaaataatgtatttttaactgggttggagtatgaaaaatgtcagagaaggattctattgaatgtttatctttcatggaaagttctttcagggaaagttaaacagaaaatagtatgatatttttatttacttataactataaaattacatgccatctcatatatctcacaactataaaattataagaaaataaaaatctttaaaatgacttatcatgtgatacttagtggtttgctaaagtttctttacgtgcacaactatttctcaaactggtaattgcatgcttttctcaaggctccttaaaaatgagtcattggctttagctttttagttgaccaaatgcaaacatcctgaagtagaatgcaggtcaaatatttgctttttgagaagcatacttctatcaaatgcaagtggaattcctttaagcagtccttagaaattatctctaaaattgttgccctcatatttttttgtcaggactaagttaagttggagttaaagttagcattccaccagctctttatagcttagaggtttttcttaattctatgttttaagagttttagtcaacatagcttatctctgtaatgtaaaggacactattttatgagcaccggtgccccaaacagaattcttcccttaaatgatcagcgtaactccctttccctcctctatttgatttctggtaacattaactcaccaaaggttctcatgcatttgtaataaaacaggaacaagcttcaaaggattttaaacactatttagttgtgtgtttctttgatgcaaagaagaaatactggattgaactgacttttcaaacattacttatagaactttaaataaaggtacaaggacacttgaaaggactgctctatgaggaggttgagtttgtcagtctcttttggtcacatctctatgatgaataaaaatgagtgttaggatgaacttgtagcctctgccgacaaggacttggctatggaccatcttggtaaaggccattttttttttttttatccatagatgccagtttcacatctcaccacactttgactatgggtataatgagggcatagcagagtaattaccaatgaggatctttacatatgccattcttattttaaataagaaatatgatttaatcattgctatccttatctttctggggttctcagtcttagacacggacctctaaaaactaactgagaagtttagcaatgctatgtaatacaaaacaacagtctttttaagaactctgacatctagaagctatcaacatcacaataaaattctcaaccagaataaaatgactgagtggtttatatccactcttcaacatttaggaatgttgggtcagtagaactatattttcttgaggagctctaatacgtggataataaatttttcaaggcctatctatagtcaaatatttgtcactattttgtcaaaacaggacgttcttttacctcatcttacaccagtactctggttaagtgaaaacattgtaaatggccagaccaaatatggggaaataagtaagatattttttctctatccagtggtagttatagagctttgaaaatatttttgttttacattgatggatgttaatcccttttatatattaataaagtaaaaagctaaacaaacagagctagggaaaatatcggagttgactctacttatctcctttaagatagcaggcttttcttttacatgtccattgactctggaaactggacttcacagtaaggaccacctttttggtgttaaccctgtcttaagtagtttcttgccaggcaccgcctcagttgtgaatctctggagagattagttaaaagggttactgttattcaattgattaaccatggttgcttttgtattttggggggggggttataataaaaatcttgtcagcacaacttaatttccatcatttgaaacatgtgtgataaatattctactgtttataccacaggactcaaactttaaaaattacaaattggattttaaagaagctaccagcctagcttggaatgtgcacgtattttgaaataaattgttctattgttgttgctaaaaccttattaaacaaatatttaaaatattaatcaattttaaaagtccaatatttttattttatattattttaatatgtggaaaattatacacagaacattgacttttcaaaaattaaacagtacattgtgcaaaaccttaataaaaatttccctatgtcgtttttactacatccaatgtttgtaaattgccagaaaataaagtaagatgtcaattacagtaaaggattctggaatcattttgacttaactaaagacctcacagtagcctgtgatatataaataaatcatttctctggtttga

SEQ ID NO: 964 - DNA, 19 bp, synthetic construct
  misc_feature 1..19: note = Synthetic
  source 1..19: mol_type = other DNA
ggcagacacattatgacat

SEQ ID NO: 965 - DNA, 19 bp, synthetic construct
  misc_feature 1..19: note = Synthetic
  source 1..19: mol_type = other DNA
tttgctccttcatataagt

SEQ ID NO: 966 - DNA, 19 bp, synthetic construct
  misc_feature 1..19: note = Synthetic
  source 1..19: mol_type = other DNA
taagtaattattctatata

SEQ ID NO: 967 - DNA, 19 bp, synthetic construct
  misc_feature 1..19: note = Synthetic
  source 1..19: mol_type = other DNA
ataagtaattattctatat

SEQ ID NO: 968 - DNA, 19 bp, synthetic construct
  misc_feature 1..19: note = Synthetic
  source 1..19: mol_type = other DNA
tacctatatgaatatgaga

SEQ ID NO: 969 - DNA, 19 bp, synthetic construct
  misc_feature 1..19: note = Synthetic
  source 1..19: mol_type = other DNA
tcattaaatacctatatga

SEQ ID NO: 970 - DNA, 19 bp, synthetic construct
  misc_feature 1..19: note = Synthetic
  source 1..19: mol_type = other DNA
acaggcccatcgaggtaaa

SEQ ID NO: 971 - DNA, 19 bp, synthetic construct
  misc_feature 1..19: note = Synthetic
  source 1..19: mol_type = other DNA
acattatgacattttagca

SEQ ID NO: 972 - DNA, 19 bp, synthetic construct
  misc_feature 1..19: note = Synthetic
  source 1..19: mol_type = other DNA
ctggcagacacattatgac

SEQ ID NO: 973 - DNA, 19 bp, synthetic construct
  misc_feature 1..19: note = Synthetic
  source 1..19: mol_type = other DNA
gttgagttttgtatacgtt

SEQ ID NO: 974 - DNA, 19 bp, synthetic construct
  misc_feature 1..19: note = Synthetic
  source 1..19: mol_type = other DNA
ccattatgtttggatcatt

SEQ ID NO: 975 - DNA, 19 bp, synthetic construct
  misc_feature 1..19: note = Synthetic
  source 1..19: mol_type = other DNA
gaagaatcatcagtaacat

SEQ ID NO: 976 - DNA, 19 bp, synthetic construct
  misc_feature 1..19: note = Synthetic
  source 1..19: mol_type = other DNA
gaaagaagttcctaacaga

SEQ ID NO: 977 - DNA, 19 bp, synthetic construct
  misc_feature 1..19: note = Synthetic
  source 1..19: mol_type = other DNA
gtcaactattcagaattga

SEQ ID NO: 978 - DNA, 19 bp, synthetic construct
  misc_feature 1..19: note = Synthetic
  source 1..19: mol_type = other DNA
caagggtattattcgagtt

SEQ ID NO: 979 - DNA, 19 bp, synthetic construct
  misc_feature 1..19: note = Synthetic
  source 1..19: mol_type = other DNA
ctgattcctttggattcaa

SEQ ID NO: 980 - DNA, 19 bp, synthetic construct
  misc_feature 1..19: note = Synthetic
  source 1..19: mol_type = other DNA
gagatacagtaggtgtaat

SEQ ID NO: 981 - DNA, 19 bp, synthetic construct
  misc_feature 1..19: note = Synthetic
  source 1..19: mol_type = other DNA
cttggatcattaaatacct

SEQ ID NO: 982 - DNA, 19 bp, synthetic construct
  misc_feature 1..19: note = Synthetic
  source 1..19: mol_type = other DNA
gacaggcccatcgaggtaa

SEQ ID NO: 983 - DNA, 19 bp, synthetic construct
  misc_feature 1..19: note = Synthetic
  source 1..19: mol_type = other DNA
ccattatgcttggatcatt

SEQ ID NO: 984 - DNA, 19 bp, synthetic construct
  misc_feature 1..19: note = Synthetic
  source 1..19: mol_type = other DNA
ggagaaacatggaattgga

SEQ ID NO: 985 - DNA, 19 bp, synthetic construct
  misc_feature 1..19: note = Synthetic
  source 1..19: mol_type = other DNA
gggagtcacatttagatat

SEQ ID NO: 986 - DNA, 19 bp, synthetic construct
  misc_feature 1..19: note = Synthetic
  source 1..19: mol_type = other DNA
ggagagtttcctttgctga

SEQ ID NO: 987 - DNA, 19 bp, synthetic construct
  misc_feature 1..19: note = Synthetic
  source 1..19: mol_type = other DNA
cttagaaattatctctaaa

SEQ ID NO: 988 - RNA, 21 nt, synthetic construct
  misc_feature 1..21: note = Synthetic
  source 1..21: mol_type = other RNA
ctggcagacacattatgacat

SEQ ID NO: 989 - RNA, 21 nt, synthetic construct
  misc_feature 1..21: note = Synthetic
  source 1..21: mol_type = other RNA
agtttgctccttcatataagt

SEQ ID NO: 990 - RNA, 21 nt, synthetic construct
  misc_feature 1..21: note = Synthetic
  source 1..21: mol_type = other RNA
tataagtaattattctatata

SEQ ID NO: 991 - RNA, 21 nt, synthetic construct
  misc_feature 1..21: note = Synthetic
  source 1..21: mol_type = other RNA
atataagtaattattctatat

SEQ ID NO: 992 - RNA, 21 nt, synthetic construct
  misc_feature 1..21: note = Synthetic
  source 1..21: mol_type = other RNA
aatacctatatgaatatgaga

SEQ ID NO: 993 - RNA, 21 nt, synthetic construct
  misc_feature 1..21: note = Synthetic
  source 1..21: mol_type = other RNA
gatcattaaatacctatatga

SEQ ID NO: 994 - RNA, 21 nt, synthetic construct
  misc_feature 1..21: note = Synthetic
  source 1..21: mol_type = other RNA
tgacaggcccatcgaggtaaa

SEQ ID NO: 995 - RNA, 21 nt, synthetic construct
  misc_feature 1..21: note = Synthetic
  source 1..21: mol_type = other RNA
acacattatgacattttagca

SEQ ID NO: 996 - RNA, 21 nt, synthetic construct
  misc_feature 1..21: note = Synthetic
  source 1..21: mol_type = other RNA
gactggcagacacattatgac

SEQ ID NO: 997 - RNA, 21 nt, synthetic construct
  misc_feature 1..21: note = Synthetic
  source 1..21: mol_type = other RNA
aagttgagttttgtatacgtt

SEQ ID NO: 998 - RNA, 21 nt, synthetic construct
  misc_feature 1..21: note = Synthetic
  source 1..21: mol_type = other RNA
gaccattatgtttggatcatt

SEQ ID NO: 999 - RNA, 21 nt, synthetic construct
  misc_feature 1..21: note = Synthetic
  source 1..21: mol_type = other RNA
aagaagaatcatcagtaacat

SEQ ID NO: 1000 - RNA, 21 nt, synthetic construct
  misc_feature 1..21: note = Synthetic
  source 1..21: mol_type = other RNA
tggaaagaagttcctaacaga

SEQ ID NO: 1001 - RNA, 21 nt, synthetic construct
  misc_feature 1..21: note = Synthetic
  source 1..21: mol_type = other RNA
gtgtcaactattcagaattga

SEQ ID NO: 1002 - RNA, 21 nt, synthetic construct
  misc_feature 1..21: note = Synthetic
  source 1..21: mol_type = other RNA
atcaagggtattattcgagtt

SEQ ID NO: 1003 - RNA, 21 nt, synthetic construct
  misc_feature 1..21: note = Synthetic
  source 1..21: mol_type = other RNA
tgctgattcctttggattcaa

SEQ ID NO: 1004 - RNA, 21 nt, synthetic construct
  misc_feature 1..21: note = Synthetic
  source 1..21: mol_type = other RNA
acgagatacagtaggtgtaat

SEQ ID NO: 1005 - RNA, 21 nt, synthetic construct
  misc_feature 1..21: note = Synthetic
  source 1..21: mol_type = other RNA
tgcttggatcattaaatacct

SEQ ID NO: 1006 - RNA, 21 nt, synthetic construct
  misc_feature 1..21: note = Synthetic
  source 1..21: mol_type = other RNA
atgacaggcccatcgaggtaa

SEQ ID NO: 1007 - RNA, 21 nt, synthetic construct
  misc_feature 1..21: note = Synthetic
  source 1..21: mol_type = other RNA
gaccattatgcttggatcatt

SEQ ID NO: 1008 - RNA, 21 nt, synthetic construct
  misc_feature 1..21: note = Synthetic
  source 1..21: mol_type = other RNA
aaggagaaacatggaattgga

SEQ ID NO: 1009 - RNA, 21 nt, synthetic construct
  misc_feature 1..21: note = Synthetic
  source 1..21: mol_type = other RNA
aagggagtcacatttagatat

SEQ ID NO: 1010 - RNA, 21 nt, synthetic construct
  misc_feature 1..21: note = Synthetic
  source 1..21: mol_type = other RNA
ccggagagtttcctttgctga

SEQ ID NO: 1011 - RNA, 21 nt, synthetic construct
  misc_feature 1..21: note = Synthetic
  source 1..21: mol_type = other RNA
tccttagaaattatctctaaa

SEQ ID NO: 1012 - RNA, 23 nt, synthetic construct
  misc_feature 1..23: note = Synthetic
  source 1..23: mol_type = other RNA
atgtcataatgtgtctgccagtc

SEQ ID NO: 1013 - RNA, 23 nt, synthetic construct
  misc_feature 1..23: note = Synthetic
  source 1..23: mol_type = other RNA
acttatatgaaggagcaaactta

SEQ ID NO: 1014 - RNA, 23 nt, synthetic construct
  misc_feature 1..23: note = Synthetic
  source 1..23: mol_type = other RNA
tatatagaataattacttatatg

SEQ ID NO: 1015 - RNA, 23 nt, synthetic construct
  misc_feature 1..23: note = Synthetic
  source 1..23: mol_type = other RNA
atatagaataattacttatatga

SEQ ID NO: 1016 - RNA, 23 nt, synthetic construct
  misc_feature 1..23: note = Synthetic
  source 1..23: mol_type = other RNA
tctcatattcatataggtattta

SEQ ID NO: 1017 - RNA, 23 nt, synthetic construct
  misc_feature 1..23: note = Synthetic
  source 1..23: mol_type = other RNA
tcatataggtatttaatgatcca

SEQ ID NO: 1018 - RNA, 23 nt, synthetic construct
  misc_feature 1..23: note = Synthetic
  source 1..23: mol_type = other RNA
tttacctcgatgggcctgtcact

SEQ ID NO: 1019 - RNA, 23 nt, synthetic construct
  misc_feature 1..23: note = Synthetic
  source 1..23: mol_type = other RNA
tgctaaaatgtcataatgtgtct

SEQ ID NO: 1020 - RNA, 23 nt, synthetic construct
  misc_feature 1..23: note = Synthetic
  source 1..23: mol_type = other RNA
gtcataatgtgtctgccagtcat

SEQ ID NO: 1021 - RNA, 23 nt, synthetic construct
  misc_feature 1..23: note = Synthetic
  source 1..23: mol_type = other RNA
aacgtatacaaaactcaacttta

SEQ ID NO: 1022 - RNA, 23 nt, synthetic construct
  misc_feature 1..23: note = Synthetic
  source 1..23: mol_type = other RNA
aatgatccaaacataatggtcct

SEQ ID NO: 1023 - RNA, 23 nt, synthetic construct
  misc_feature 1..23: note = Synthetic
  source 1..23: mol_type = other RNA
atgttactgatgattcttcttta

SEQ ID NO: 1024 - RNA, 23 nt, synthetic construct
  misc_feature 1..23: note = Synthetic
  source 1..23: mol_type = other RNA
tctgttaggaacttctttccatg

SEQ ID NO: 1025 - RNA, 23 nt, synthetic construct
  misc_feature 1..23: note = Synthetic
  source 1..23: mol_type = other RNA
tcaattctgaatagttgacactg

SEQ ID NO: 1026 - RNA, 23 nt, synthetic construct
  misc_feature 1..23: note = Synthetic
  source 1..23: mol_type = other RNA
aactcgaataatacccttgatac

SEQ ID NO: 1027 - RNA, 23 nt, synthetic construct
  misc_feature 1..23: note = Synthetic
  source 1..23: mol_type = other RNA
ttgaatccaaaggaatcagcaaa

SEQ ID NO: 1028 - RNA, 23 nt, synthetic construct
  misc_feature 1..23: note = Synthetic
  source 1..23: mol_type = other RNA
attacacctactgtatctcgttg

SEQ ID NO: 1029 - RNA, 23 nt, synthetic construct
  misc_feature 1..23: note = Synthetic
  source 1..23: mol_type = other RNA
aggtatttaatgatccaagcata

SEQ ID NO: 1030 - RNA, 23 nt, synthetic construct
  misc_feature 1..23: note = Synthetic
  source 1..23: mol_type = other RNA
ttacctcgatgggcctgtcattt

SEQ ID NO: 1031 - RNA, 23 nt, synthetic construct
  misc_feature 1..23: note = Synthetic
  source 1..23: mol_type = other RNA
aatgatccaagcataatggtcct

SEQ ID NO: 1032 - RNA, 23 nt, synthetic construct
  misc_feature 1..23: note = Synthetic
  source 1..23: mol_type = other RNA
tccaattccatgtttctccttgt

SEQ ID NO: 1033 - RNA, 23 nt, synthetic construct
  misc_feature 1..23: note = Synthetic
  source 1..23: mol_type = other RNA
atatctaaatgtgactccctttc

SEQ ID NO: 1034 - RNA, 23 nt, synthetic construct
  misc_feature 1..23: note = Synthetic
  source 1..23: mol_type = other RNA
tcagcaaaggaaactctccggga

SEQ ID NO: 1035 - RNA, 23 nt, synthetic construct
  misc_feature 1..23: note = Synthetic
  source 1..23: mol_type = other RNA
tttagagataatttctaaggact

SEQ ID NO: 1036 - DNA, 5974 bp, synthetic construct
  misc_feature 1..5974: note = Synthetic
  source 1..5974: mol_type = other DNA
ttccccccacccctcaagctaggctgagctgtgcctacgtcggcctcgactcccgggggctggaggagttacctttggagcccgaaaggaggaaggaagcaaaatatcaacaacagccgaggcggctcaggcgctcggccccggttccccgcttgcctgccgcccgcctgctggcccccgcgcccacgacgggggcccaggcctcacggcgccgcccagggcccgcgcggacgccggcctcatttattattctccccgcccggagctgcggcttcccggtgttgaagatcccccggaccaggggcgagggctacccgctctttgccgtgacaacaccgttcccccagccgggctggaggctgtgcagaaggtatcctgcagaccatgaactgagcactgttcccagaccgttcatgagcacagtgtaaggtgtgccgagacccaccacccagcgagcccctcccctccgtagcactgaggacccccggagaagatggggaggaaaaagattcagatccagcgaatcaccgacgagcggaaccgacaggtgactttcaccaagcggaagtttggcctgatgaagaaggcgtatgagctgagcgtgctatgtgactgcgagatcgcactcatcatcttcaaccactccaacaagctgttccagtacgccagcaccgacatggacaaggtgctgctcaagtacacggagtacaatgagccacacgagagccgcaccaacgccgacatcatcgaggcgctgcacaagaagcacagggaatgtgagagccctgaggtggacgaggtgtttgccctgaccccccagacggaagagaaatataaaaagatagacgaggagtttgataaaatgatgcagagttatagactggcctcaactgtcccggcccccaactttgccatgcctgtcacggtgcccgtgtccaatcagagctcactgcagttcagcaatcccagcggctccctggtcaccccttccctggtgacatcatccctcacggacccgcggctcctgtccccccagcagccagcactacagaggaacagtgtgtctcctggcctgccccagcggccagctagtgcgggggccatgctggggggtgacctgaacagtgctaacggagcctgccccagccctgttgggaatggctacgtcagtgctcgggcttcccctggcctcctccctgtggccaatggcaacagcctaaacaaggtcatccctgccaagtctccacccccacctacccacagcacccagcttggagcccccagccgcaagcccgacctgcgagtcatcacttcccaggcaggaaaggggttaatgcatcacttgactgaggaccatttagatctgaacaatgcccagcgccttggggtctcccagtctactcattcgctcaccaccccagtggtttctgtggcaacgccgagtttactcagccagggcctccccttctcttccatgcccactgcctacaacacagattaccagttgaccagtgcagagctctcctccttaccagcctttagttcacctggggggctgtcgctaggcaatgtcactgcctggcaacagccacagcagccccagcagccgcagcagccacagcctccacagcagcagccaccgcagccacagcagccacagccacagcagcctcagcagccgcaacagccacctcagcaacagtcccacctggtccctgtatctctcagcaacctcatcccgggcagccccctgccccacgtgggtgctgccctcacagtcaccacccacccccacatcagcatcaagtcagaaccggtgtccccaagccgtgagcgcagccctgcgcctccccctccagctgtgttcccagctgcccgccctgagcctggcgatggtctcagcagcccagccgggggatcctatgagacgggagaccgggatgacggacggggggacttcgggcccacactgggcctgctgcgcccagccccagagcctgaggctgagggctcagctgtgaagaggatgcggcttgatacctggacattaaagtgacgattcccactcccctcctctcagcctccctgatgaagagttgacaatctcaccgcccgcccttccctgccccgggctcctcccgctcgacccccacttcctttcttgtgcttcgtgtcctgttgacggttacatttgtgtataattattatattattattattattattatattttttttaatttggattctcgctttggagagggggatgctctcatcccctctttctgtaccccccaccattttcactggctggggggctctctttttcgcgggaaggggggacactttgcacgttgtacacatatgctgcaggaagggggtggggggcccaataaggcctttgggaaaggacaggtgccgagccctgcatgtggagccctcccaccccacccccagatagagggaaataaccaaaaaactaccaaacaacagaaacccacactctagactgaaaccccaaagtgggcttgatgggtgggtttgtgtttcaaggggaaagtgaggcagaggttctgaaaagggtctctgtttttgtgttcatgtagccataggcacatggagcagaatacttaagcctggcccccaaatgcccctgcacacacacgtgccacacctgcgctgattcttgtgtgtgctgcacccccaaggtgtgtgggtgctggctgagctttgggccgggaaggcagcctgggaatctgaggctggagacaggggtttgaggtgggggcctctctggaagcacatttggagggaaagacaagagagccatgaggagagggctgaggagggcagaagggctaggcagggggcaaattgagcccctcccttccccagtttttctctaagatatacagtgcaatagctccccacccctcagttgacgccagccctgtaaagctggccacagtgtgcagggagaatggggagagggtcttcagtgaggtggctggggcgagagtcggcctggacttccctggggtgctccaggccagagctctttcattggggcgagtgtggtgaggggacgtccttggtcttgcacgcacactacctgggggagtcaacactgggatggtctgtggggtgggagggcctacggatgggtccgtagaggtcccacctccctcattcctccttggcccctctccctagcttctcctgttagctccttctgctcctgaccccacctccttgctcttggcgcccctattgtctctggctacctccttgtcccaccacctccaggctgcatcccaccttccctcttggctactgtaattgtaaatagcgacctttggaaaacgttagcggtgtaacagtccaggaaactgtttttttttgttgttgttgtattgatatgaaatgagattctatttttgtcaaagtatattgtaataataatgactcaaacggcccgtactgtacagacgagattcttctgctgttgttcttgctcccctcccctcctctgagtccgcccctccctgctgcctcctcagtggggcagtgggcaaggggcccaggggcagccgaagcacggggtcctgagacctcaggcaggattggagatcaaaccagagggggcaggcccccagcctgctctctaggatcaccccccgccctaaggggcctggcctggggtgacgtggccaggcagactgtctgccccactccttcacacaagcccagctcctctgcccaaggggtgcggcgcccccttggggtttcctcccagttggagagtagagttaagacaaggcccagttttgtgttagccgaccgtctttgcccacctctatgacccagcctcttgcagtattcccatacttgatgcagggaaggaaccagaagcagaggggcctctacgcaggtacacacgtgtacctgagtgtgttcatgagggcatctggtgtttatgtgtctgagtgtagctttgtatttatgtgtgtgtgtgtgtgtatgtctgattgcacgggtgtacttttgtatttatgtgtgtgtgtggttgcacgggtgtgcctctgtgtgtctctgaccctggctgggtgtgtgtgcaaatctgtgtgactggagctctaggggcatctctgtgtctgagtgtgcctggtgtgtgtttacaaagggagagttggctgctccagctccacagccctgggaccccaactcctgtcttccctgctcctttccctgtgttcaccctcagctctgacacattgaactgcagttggggggattggcagttagccctctgtgcttctccctgcagccctacctctgccaaggtctctccctccagggacctctgcttccacccacatatgtccacttagtcacccacacttgacacagttcctggagtaccctcttcccccaaccccagacctgctttcagagcaaaactcaagtccctcttcctccgtgaagcttctccctcagctgagcagtgatcacttactcactcttaaccccaatccgctgactgggtggggacagcacgtccagccttcccacctctcctgcaggcttctagacggagtttcaaaaactgatgagcctcgatccagggcttgaaagaagccagggtgtaatcttgttcatgcatgcgtccccagagcctcgcccagtgcctggcacatagtaggcactcaataaatgctgaatgggtgaatagttgaatgataggtgctcaataaatgaatgaatggccttcccttctcaggctattcccaccattagtctgcccacctttctaggctgggcttggccaccattaaacacggggtgggggtgagggcccctgcaattcacggtgcaatattcaccagttttgccctctgcctcataaaggcaaacctggcttttgattaccatgtgtggatgtttcagtgtcctttcttctctgtccctggggatggggtggtctgtgaatatgtgacatttctgcagttcagtatccgaaggtttctcttgggggtaggggctcctgggcggccagatgaatgggtccctgggaacccagacctcagatgaggacttaatgtcttcttcctctcaagccaaattcgcctccacccactccctctgaagaactgggcatttgccaaagtaaccactggagtcatctaatggccctccccctccccaggtttcccacagctttcagggacagtgggcaagaggacacccccccccaccacctcagtggaacacaccattctccccccctcaacagcacactcagtgcagcaagactgacccctgaccccctcccagccctccctaccttggacaggaaggaagtaatgcaccttctcttgctgattatttatttgtttggagagacagaaatgtaaaagtgtatctagaaatatctatatctctatatatttttaactgactctttggaatcccctggggtggggtgaggggtaagtttaggctttcgcggaggggaggagacatggagcctgggaactccttgttctcccctctgctgcctctccccaccccttaaagcagttggtagaaggaatggtatttgtatggggggagggaggctggaatggagaatctggattctctcctcttccccattctccagagggagggaggtggtgaggaagaggaagggaggggcaggatgggccatggaggtgccccacccccacacctgacaatcacccacactcctggggctcttcctgggtcctggggcagggcgagtccaagtgtgaggctgttgatttgttttcaatatttcttttcgtgctgtatggtgatgctttcttagtattctacacaataagaaaagacaaagtcctcgagattcttatgagttttgtttgaaaactctttcactatatttgttgtaaagaggtttactattaaaagaaaaagaatacacgtttctgata

SEQ ID NO: 1037 - DNA, 5951 bp, synthetic construct
  misc_feature 1..5951: note = Synthetic
  source 1..5951: mol_type = other DNA
ccccccacccctcaagctaggctgagctgtgcctacgtcggcctcgactcccgggggctggaggagttacctttggagcccgaaaggaggaaggaagcaaaatatcaacaacagccgaggcggctcaggcgctcggccccggttccccgcttgcctgccgcccgcctgctggcccccgcgcccacgacgggggcccaggcctcacggcgccgcccagggcccgcgcggacgccggcctcatttattattctccccgcccggagctgcggcttcccggtgttgaagatcccccggaccaggggcgagggctacccgctctttgccgtgacaacaccgttcccccagccgggctggaggctgtgcagaaggtatcctgcagaccatgaactgagcactgttcccagaccgttcatgagcacagtgtaaggtgtgccgagacccaccacccagcgagcccctcccctccgtagcactgaggacccccggagaagatggggaggaaaaagattcagatccagcgaatcaccgacgagcggaaccgacaggtgactttcaccaagcggaagtttggcctgatgaagaaggcgtatgagctgagcgtgctatgtgactgcgagatcgcactcatcatcttcaaccactccaacaagctgttccagtacgccagcaccgacatggacaaggtgctgctcaagtacacggagtacaatgagccacacgagagccgcaccaacgccgacatcatcgaggcgctgcacaagaagcacagggaatgtgagagccctgaggtggacgaggtgtttgccctgaccccccagacggaagagaaatataaaaagatagacgaggagtttgataaaatgatgcagagttatagactggcctcaactgtcccggcccccaactttgccatgcctgtcacggtgcccgtgtccaatcagagctcactgcagttcagcaatcccagcggctccctggtcaccccttccctggtgacatcatccctcacggacccgcggctcctgtccccccagcagccagcactacagaggaacagtgtgtctcctggcctgccccagcggccagctagtgcgggggccatgctggggggtgacctgaacagtgctaacggagcctgccccagccctgttgggaatggctacgtcagtgctcgggcttcccctggcctcctccctgtggccaatggcaacagcctaaacaaggtcatccctgccaagtctccacccccacctacccacagcacccagcttggagcccccagccgcaagcccgacctgcgagtcatcacttcccaggcaggaaaggggttaatgcatcacttgaacaatgcccagcgccttggggtctcccagtctactcattcgctcaccaccccagtggtttctgtggcaacgccgagtttactcagccagggcctccccttctcttccatgcccactgcctacaacacagattaccagttgaccagtgcagagctctcctccttaccagcctttagttcacctggggggctgtcgctaggcaatgtcactgcctggcaacagccacagcagccccagcagccgcagcagccacagcctccacagcagcagccaccgcagccacagcagccacagccacagcagcctcagcagccgcaacagccacctcagcaacagtcccacctggtccctgtatctctcagcaacctcatcccgggcagccccctgccccacgtgggtgctgccctcacagtcaccacccacccccacatcagcatcaagtcagaaccggtgtccccaagccgtgagcgcagccctgcgcctccccctccagctgtgttcccagctgcccgccctgagcctggcgatggtctcagcagcccagccgggggatcctatgagacgggagaccgggatgacggacggggggacttcgggcccacactgggcctgctgcgcccagccccagagcctgaggctgagggctcagctgtgaagaggatgcggcttgatacctggacattaaagtgacgattcccactcccctcctctcagcctccctgatgaagagttgacaatctcaccgcccgcccttccctgccccgggctcctcccgctcgacccccacttcctttcttgtgcttcgtgtcctgttgacggttacatttgtgtataattattatattattattattattattatattttttttaatttggattctcgctttggagagggggatgctctcatcccctctttctgtaccccccaccattttcactggctggggggctctctttttcgcgggaaggggggacactttgcacgttgtacacatatgctgcaggaagggggtggggggcccaataaggcctttgggaaaggacaggtgccgagccctgcatgtggagccctcccaccccacccccagatagagggaaataaccaaaaaactaccaaacaacagaaacccacactctagactgaaaccccaaagtgggcttgatgggtgggtttgtgtttcaaggggaaagtgaggcagaggttctgaaaagggtctctgtttttgtgttcatgtagccataggcacatggagcagaatacttaagcctggcccccaaatgcccctgcacacacacgtgccacacctgcgctgattcttgtgtgtgctgcacccccaaggtgtgtgggtgctggctgagctttgggccgggaaggcagcctgggaatctgaggctggagacaggggtttgaggtgggggcctctctggaagcacatttggagggaaagacaagagagccatgaggagagggctgaggagggcagaagggctaggcagggggcaaattgagcccctcccttccccagtttttctctaagatatacagtgcaatagctccccacccctcagttgacgccagccctgtaaagctggccacagtgtgcagggagaatggggagagggtcttcagtgaggtggctggggcgagagtcggcctggacttccctggggtgctccaggccagagctctttcattggggcgagtgtggtgaggggacgtccttggtcttgcacgcacactacctgggggagtcaacactgggatggtctgtggggtgggagggcctacggatgggtccgtagaggtcccacctccctcattcctccttggcccctctccctagcttctcctgttagctccttctgctcctgaccccacctccttgctcttggcgcccctattgtctctggctacctccttgtcccaccacctccaggctgcatcccaccttccctcttggctactgtaattgtaaatagcgacctttggaaaacgttagcggtgtaacagtccaggaaactgtttttttttgttgttgttgtattgatatgaaatgagattctatttttgtcaaagtatattgtaataataatgactcaaacggcccgtactgtacagacgagattcttctgctgttgttcttgctcccctcccctcctctgagtccgcccctccctgctgcctcctcagtggggcagtgggcaaggggcccaggggcagccgaagcacggggtcctgagacctcaggcaggattggagatcaaaccagagggggcaggcccccagcctgctctctaggatcaccccccgccctaaggggcctggcctggggtgacgtggccaggcagactgtctgccccactccttcacacaagcccagctcctctgcccaaggggtgcggcgcccccttggggtttcctcccagttggagagtagagttaagacaaggcccagttttgtgttagccgaccgtctttgcccacctctatgacccagcctcttgcagtattcccatacttgatgcagggaaggaaccagaagcagaggggcctctacgcaggtacacacgtgtacctgagtgtgttcatgagggcatctggtgtttatgtgtctgagtgtagctttgtatttatgtgtgtgtgtgtgtgtatgtctgattgcacgggtgtacttttgtatttatgtgtgtgtgtggttgcacgggtgtgcctctgtgtgtctctgaccctggctgggtgtgtgtgcaaatctgtgtgactggagctctaggggcatctctgtgtctgagtgtgcctggtgtgtgtttacaaagggagagttggctgctccagctccacagccctgggaccccaactcctgtcttccctgctcctttccctgtgttcaccctcagctctgacacattgaactgcagttggggggattggcagttagccctctgtgcttctccctgcagccctacctctgccaaggtctctccctccagggacctctgcttccacccacatatgtccacttagtcacccacacttgacacagttcctggagtaccctcttcccccaaccccagacctgctttcagagcaaaactcaagtccctcttcctccgtgaagcttctccctcagctgagcagtgatcacttactcactcttaaccccaatccgctgactgggtggggacagcacgtccagccttcccacctctcctgcaggcttctagacggagtttcaaaaactgatgagcctcgatccagggcttgaaagaagccagggtgtaatcttgttcatgcatgcgtccccagagcctcgcccagtgcctggcacatagtaggcactcaataaatgctgaatgggtgaatagttgaatgataggtgctcaataaatgaatgaatggccttcccttctcaggctattcccaccattagtctgcccacctttctaggctgggcttggccaccattaaacacggggtgggggtgagggcccctgcaattcacggtgcaatattcaccagttttgccctctgcctcataaaggcaaacctggcttttgattaccatgtgtggatgtttcagtgtcctttcttctctgtccctggggatggggtggtctgtgaatatgtgacatttctgcagttcagtatccgaaggtttctcttgggggtaggggctcctgggcggccagatgaatgggtccctgggaacccagacctcagatgaggacttaatgtcttcttcctctcaagccaaattcgcctccacccactccctctgaagaactgggcatttgccaaagtaaccactggagtcatctaatggccctccccctccccaggtttcccacagctttcagggacagtgggcaagaggacacccccccccaccacctcagtggaacacaccattctccccccctcaacagcacactcagtgcagcaagactgacccctgaccccctcccagccctccctaccttggacaggaaggaagtaatgcaccttctcttgctgattatttatttgtttggagagacagaaatgtaaaagtgtatctagaaatatctatatctctatatatttttaactgactctttggaatcccctggggtggggtgaggggtaagtttaggctttcgcggaggggaggagacatggagcctgggaactccttgttctcccctctgctgcctctccccaccccttaaagcagttggtagaaggaatggtatttgtatggggggagggaggctggaatggagaatctggattctctcctcttccccattctccagagggagggaggtggtgaggaagaggaagggaggggcaggatgggccatggaggtgccccacccccacacctgacaatcacccacactcctggggctcttcctgggtcctggggcagggcgagtccaagtgtgaggctgttgatttgttttcaatatttcttttcgtgctgtatggtgatgctttcttagtattctacacaataagaaaagacaaagtcctcgagattcttatgagttttgtttgaaaactctttcactatatttgttgtaaagaggtttactattaaaagaaaaagaatacacgtttctgata

SEQ ID NO: 1038 - DNA, 5953 bp, synthetic construct
  misc_feature 1..5953: note = Synthetic
  source 1..5953: mol_type = other DNA
cccccacccctcaagctaggctgagctgtgcctacgtcggcctcgactcccgggggctggaggagttacctttggagcccgaaaggaggaaggaagcaaaatatcaacaacagccgaggcggctcaggcgctcggccccggttccccgcttgcctgccgcccgcctgctggcccccgcgcccacgacgggggcccaggcctcacggcgccgcccagggcccgcgcggacgccggcctcatttattattctccccgcccggagctgcggcttcccggtgttgaagatcccccggaccaggggcgagggctacccgctctttgccgtgacaacaccgttcccccagccgggctggaggctgtgcagaaggtatcctgcagaccatgaactgagcactgttcccagaccgttcatgagcacagtgtaaggtgtgccgagacccaccacccagcgagcccctcccctccgtagcactgaggacccccggagaagatggggaggaaaaagattcagatccagcgaatcaccgacgagcggaaccgacaggtgactttcaccaagcggaagtttggcctgatgaagaaggcgtatgagctgagcgtgctatgtgactgcgagatcgcactcatcatcttcaaccactccaacaagctgttccagtacgccagcaccgacatggacaaggtgctgctcaagtacacggagtacaatgagccacacgagagccgcaccaacgccgacatcatcgagaccctgaggaagaagggcttcaacggctgcgacagccccgagcccgacggggaggactcgctggaacagagccccctgctggaggacaagtaccgacgcgccagcgaggagctcgacgggctcttccggcgctatgggtcaactgtcccggcccccaactttgccatgcctgtcacggtgcccgtgtccaatcagagctcactgcagttcagcaatcccagcggctccctggtcaccccttccctggtgacatcatccctcacggacccgcggctcctgtccccccagcagccagcactacagaggaacagtgtgtctcctggcctgccccagcggccagctagtgcgggggccatgctggggggtgacctgaacagtgctaacggagcctgccccagccctgttgggaatggctacgtcagtgctcgggcttcccctggcctcctccctgtggccaatggcaacagcctaaacaaggtcatccctgccaagtctccacccccacctacccacagcacccagcttggagcccccagccgcaagcccgacctgcgagtcatcacttcccaggcaggaaaggggttaatgcatcacttgaacaatgcccagcgccttggggtctcccagtctactcattcgctcaccaccccagtggtttctgtggcaacgccgagtttactcagccagggcctccccttctcttccatgcccactgcctacaacacagattaccagttgaccagtgcagagctctcctccttaccagcctttagttcacctggggggctgtcgctaggcaatgtcactgcctggcaacagccacagcagccccagcagccgcagcagccacagcctccacagcagcagccaccgcagccacagcagccacagccacagcagcctcagcagccgcaacagccacctcagcaacagtcccacctggtccctgtatctctcagcaacctcatcccgggcagccccctgccccacgtgggtgctgccctcacagtcaccacccacccccacatcagcatcaagtcagaaccggtgtccccaagccgtgagcgcagccctgcgcctccccctccagctgtgttcccagctgcccgccctgagcctggcgatggtctcagcagcccagccgggggatcctatgagacgggagaccgggatgacggacggggggacttcgggcccacactgggcctgctgcgcccagccccagagcctgaggctgagggctcagctgtgaagaggatgcggcttgatacctggacattaaagtgacgattcccactcccctcctctcagcctccctgatgaagagttgacaatctcaccgcccgcccttccctgccccgggctcctcccgctcgacccccacttcctttcttgtgcttcgtgtcctgttgacggttacatttgtgtataattattatattattattattattattatattttttttaatttggattctcgctttggagagggggatgctctcatcccctctttctgtaccccccaccattttcactggctggggggctctctttttcgcgggaaggggggacactttgcacgttgtacacatatgctgcaggaagggggtggggggcccaataaggcctttgggaaaggacaggtgccgagccctgcatgtggagccctcccaccccacccccagatagagggaaataaccaaaaaactaccaaacaacagaaacccacactctagactgaaaccccaaagtgggcttgatgggtgggtttgtgtttcaaggggaaagtgaggcagaggttctgaaaagggtctctgtttttgtgttcatgtagccataggcacatggagcagaatacttaagcctggcccccaaatgcccctgcacacacacgtgccacacctgcgctgattcttgtgtgtgctgcacccccaaggtgtgtgggtgctggctgagctttgggccgggaaggcagcctgggaatctgaggctggagacaggggtttgaggtgggggcctctctggaagcacatttggagggaaagacaagagagccatgaggagagggctgaggagggcagaagggctaggcagggggcaaattgagcccctcccttccccagtttttctctaagatatacagtgcaatagctccccacccctcagttgacgccagccctgtaaagctggccacagtgtgcagggagaatggggagagggtcttcagtgaggtggctggggcgagagtcggcctggacttccctggggtgctccaggccagagctctttcattggggcgagtgtggtgaggggacgtccttggtcttgcacgcacactacctgggggagtcaacactgggatggtctgtggggtgggagggcctacggatgggtccgtagaggtcccacctccctcattcctccttggcccctctccctagcttctcctgttagctccttctgctcctgaccccacctccttgctcttggcgcccctattgtctctggctacctccttgtcccaccacctccaggctgcatcccaccttccctcttggctactgtaattgtaaatagcgacctttggaaaacgttagcggtgtaacagtccaggaaactgtttttttttgttgttgttgtattgatatgaaatgagattctatttttgtcaaagtatattgtaataataatgactcaaacggcccgtactgtacagacgagattcttctgctgttgttcttgctcccctcccctcctctgagtccgcccctccctgctgcctcctcagtggggcagtgggcaaggggcccaggggcagccgaagcacggggtcctgagacctcaggcaggattggagatcaaaccagagggggcaggcccccagcctgctctctaggatcaccccccgccctaaggggcctggcctggggtgacgtggccaggcagactgtctgccccactccttcacacaagcccagctcctctgcccaaggggtgcggcgcccccttggggtttcctcccagttggagagtagagttaagacaaggcccagttttgtgttagccgaccgtctttgcccacctctatgacccagcctcttgcagtattcccatacttgatgcagggaaggaaccagaagcagaggggcctctacgcaggtacacacgtgtacctgagtgtgttcatgagggcatctggtgtttatgtgtctgagtgtagctttgtatttatgtgtgtgtgtgtgtgtatgtctgattgcacgggtgtacttttgtatttatgtgtgtgtgtggttgcacgggtgtgcctctgtgtgtctctgaccctggctgggtgtgtgtgcaaatctgtgtgactggagctctaggggcatctctgtgtctgagtgtgcctggtgtgtgtttacaaagggagagttggctgctccagctccacagccctgggaccccaactcctgtcttccctgctcctttccctgtgttcaccctcagctctgacacattgaactgcagttggggggattggcagttagccctctgtgcttctccctgcagccctacctctgccaaggtctctccctccagggacctctgcttccacccacatatgtccacttagtcacccacacttgacacagttcctggagtaccctcttcccccaaccccagacctgctttcagagcaaaactcaagtccctcttcctccgtgaagcttctccctcagctgagcagtgatcacttactcactcttaaccccaatccgctgactgggtggggacagcacgtccagccttcccacctctcctgcaggcttctagacggagtttcaaaaactgatgagcctcgatccagggcttgaaagaagccagggtgtaatcttgttcatgcatgcgtccccagagcctcgcccagtgcctggcacatagtaggcactcaataaatgctgaatgggtgaatagttgaatgataggtgctcaataaatgaatgaatggccttcccttctcaggctattcccaccattagtctgcccacctttctaggctgggcttggccaccattaaacacggggtgggggtgagggcccctgcaattcacggtgcaatattcaccagttttgccctctgcctcataaaggcaaacctggcttttgattaccatgtgtggatgtttcagtgtcctttcttctctgtccctggggatggggtggtctgtgaatatgtgacatttctgcagttcagtatccgaaggtttctcttgggggtaggggctcctgggcggccagatgaatgggtccctgggaacccagacctcagatgaggacttaatgtcttcttcctctcaagccaaattcgcctccacccactccctctgaagaactgggcatttgccaaagtaaccactggagtcatctaatggccctccccctccccaggtttcccacagctttcagggacagtgggcaagaggacacccccccccaccacctcagtggaacacaccattctccccccctcaacagcacactcagtgcagcaagactgacccctgaccccctcccagccctccctaccttggacaggaaggaagtaatgcaccttctcttgctgattatttatttgtttggagagacagaaatgtaaaagtgtatctagaaatatctatatctctatatatttttaactgactctttggaatcccctggggtggggtgaggggtaagtttaggctttcgcggaggggaggagacatggagcctgggaactccttgttctcccctctgctgcctctccccaccccttaaagcagttggtagaaggaatggtatttgtatggggggagggaggctggaatggagaatctggattctctcctcttccccattctccagagggagggaggtggtgaggaagaggaagggaggggcaggatgggccatggaggtgccccacccccacacctgacaatcacccacactcctggggctcttcctgggtcctggggcagggcgagtccaagtgtgaggctgttgatttgttttcaatatttcttttcgtgctgtatggtgatgctttcttagtattctacacaataagaaaagacaaagtcctcgagattcttatgagttttgtttgaaaactctttcactatatttgttgtaaagaggtttactattaaaagaaaaagaatacacgtttctgata

SEQ ID NO: 1039 - DNA, 5961 bp, synthetic construct
  misc_feature 1..5961: note = Synthetic
  source 1..5961: mol_type = other DNA
ccccacccctcaagctaggctgagctgtgcctacgtcggcctcgactcccgggggctggaggagttacctttggagcccgaaaggaggaaggaagcaaaatatcaacaacagccgaggcggctcaggcgctcggccccggttccccgcttgcctgccgcccgcctgctggcccccgcgcccacgacgggggcccaggcctcacggcgccgcccagggcccgcgcggacgccggcctcatttattattctccccgcccggagctgcggcttcccggtgttgaagatcccccggaccaggggcgagggctacccgctctttgccgtgacaacaccgttcccccagccgggctgaaggtatcctgcagaccatgaactgagcactgttcccagaccgttcatgagcacagtgtaaggtgtgccgagacccaccacccagcgagcccctcccctccgtagcactgaggacccccggagaagatggggaggaaaaagattcagatccagcgaatcaccgacgagcggaaccgacaggtgactttcaccaagcggaagtttggcctgatgaagaaggcgtatgagctgagcgtgctatgtgactgcgagatcgcactcatcatcttcaaccactccaacaagctgttccagtacgccagcaccgacatggacaaggtgctgctcaagtacacggagtacaatgagccacacgagagccgcaccaacgccgacatcatcgagaccctgaggaagaagggcttcaacggctgcgacagccccgagcccgacggggaggactcgctggaacagagccccctgctggaggacaagtaccgacgcgccagcgaggagctcgacgggctcttccggcgctatgggtcaactgtcccggcccccaactttgccatgcctgtcacggtgcccgtgtccaatcagagctcactgcagttcagcaatcccagcggctccctggtcaccccttccctggtgacatcatccctcacggacccgcggctcctgtccccccagcagccagcactacagaggaacagtgtgtctcctggcctgccccagcggccagctagtgcgggggccatgctggggggtgacctgaacagtgctaacggagcctgccccagccctgttgggaatggctacgtcagtgctcgggcttcccctggcctcctccctgtggccaatggcaacagcctaaacaaggtcatccctgccaagtctccacccccacctacccacagcacccagcttggagcccccagccgcaagcccgacctgcgagtcatcacttcccaggcaggaaaggggttaatgcatcacttgactgaggaccatttagatctgaacaatgcccagcgccttggggtctcccagtctactcattcgctcaccaccccagtggtttctgtggcaacgccgagtttactcagccagggcctccccttctcttccatgcccactgcctacaacacagattaccagttgaccagtgcagagctctcctccttaccagcctttagttcacctggggggctgtcgctaggcaatgtcactgcctggcaacagccacagcagccccagcagccgcagcagccacagcctccacagcagcagccaccgcagccacagcagccacagccacagcagcctcagcagccgcaacagccacctcagcaacagtcccacctggtccctgtatctctcagcaacctcatcccgggcagccccctgccccacgtgggtgctgccctcacagtcaccacccacccccacatcagcatcaagtcagaaccggtgtccccaagccgtgagcgcagccctgcgcctccccctccagctgtgttcccagctgcccgccctgagcctggcgatggtctcagcagcccagccgggggatcctatgagacgggagaccgggatgacggacggggggacttcgggcccacactgggcctgctgcgcccagccccagagcctgaggctgagggctcagctgtgaagaggatgcggcttgatacctggacattaaagtgacgattcccactcccctcctctcagcctccctgatgaagagttgacaatctcaccgcccgcccttccctgccccgggctcctcccgctcgacccccacttcctttcttgtgcttcgtgtcctgttgacggttacatttgtgtataattattatattattattattattattatattttttttaatttggattctcgctttggagagggggatgctctcatcccctctttctgtaccccccaccattttcactggctggggggctctctttttcgcgggaaggggggacactttgcacgttgtacacatatgctgcaggaagggggtggggggcccaataaggcctttgggaaaggacaggtgccgagccctgcatgtggagccctcccaccccacccccagatagagggaaataaccaaaaaactaccaaacaacagaaacccacactctagactgaaaccccaaagtgggcttgatgggtgggtttgtgtttcaaggggaaagtgaggcagaggttctgaaaagggtctctgtttttgtgttcatgtagccataggcacatggagcagaatacttaagcctggcccccaaatgcccctgcacacacacgtgccacacctgcgctgattcttgtgtgtgctgcacccccaaggtgtgtgggtgctggctgagctttgggccgggaaggcagcctgggaatctgaggctggagacaggggtttgaggtgggggcctctctggaagcacatttggagggaaagacaagagagccatgaggagagggctgaggagggcagaagggctaggcagggggcaaattgagcccctcccttccccagtttttctctaagatatacagtgcaatagctccccacccctcagttgacgccagccctgtaaagctggccacagtgtgcagggagaatggggagagggtcttcagtgaggtggctggggcgagagtcggcctggacttccctggggtgctccaggccagagctctttcattggggcgagtgtggtgaggggacgtccttggtcttgcacgcacactacctgggggagtcaacactgggatggtctgtggggtgggagggcctacggatgggtccgtagaggtcccacctccctcattcctccttggcccctctccctagcttctcctgttagctccttctgctcctgaccccacctccttgctcttggcgcccctattgtctctggctacctccttgtcccaccacctccaggctgcatcccaccttccctcttggctactgtaattgtaaatagcgacctttggaaaacgttagcggtgtaacagtccaggaaactgtttttttttgttgttgttgtattgatatgaaatgagattctatttttgtcaaagtatattgtaataataatgactcaaacggcccgtactgtacagacgagattcttctgctgttgttcttgctcccctcccctcctctgagtccgcccctccctgctgcctcctcagtggggcagtgggcaaggggcccaggggcagccgaagcacggggtcctgagacctcaggcaggattggagatcaaaccagagggggcaggcccccagcctgctctctaggatcaccccccgccctaaggggcctggcctggggtgacgtggccaggcagactgtctgccccactccttcacacaagcccagctcctctgcccaaggggtgcggcgcccccttggggtttcctcccagttggagagtagagttaagacaaggcccagttttgtgttagccgaccgtctttgcccacctctatgacccagcctcttgcagtattcccatacttgatgcagggaaggaaccagaagcagaggggcctctacgcaggtacacacgtgtacctgagtgtgttcatgagggcatctggtgtttatgtgtctgagtgtagctttgtatttatgtgtgtgtgtgtgtgtatgtctgattgcacgggtgtacttttgtatttatgtgtgtgtgtggttgcacgggtgtgcctctgtgtgtctctgaccctggctgggtgtgtgtgcaaatctgtgtgactggagctctaggggcatctctgtgtctgagtgtgcctggtgtgtgtttacaaagggagagttggctgctccagctccacagccctgggaccccaactcctgtcttccctgctcctttccctgtgttcaccctcagctctgacacattgaactgcagttggggggattggcagttagccctctgtgcttctccctgcagccctacctctgccaaggtctctccctccagggacctctgcttccacccacatatgtccacttagtcacccacacttgacacagttcctggagtaccctcttcccccaaccccagacctgctttcagagcaaaactcaagtccctcttcctccgtgaagcttctccctcagctgagcagtgatcacttactcactcttaaccccaatccgctgactgggtggggacagcacgtccagccttcccacctctcctgcaggcttctagacggagtttcaaaaactgatgagcctcgatccagggcttgaaagaagccagggtgtaatcttgttcatgcatgcgtccccagagcctcgcccagtgcctggcacatagtaggcactcaataaatgctgaatgggtgaatagttgaatgataggtgctcaataaatgaatgaatggccttcccttctcaggctattcccaccattagtctgcccacctttctaggctgggcttggccaccattaaacacggggtgggggtgagggcccctgcaattcacggtgcaatattcaccagttttgccctctgcctcataaaggcaaacctggcttttgattaccatgtgtggatgtttcagtgtcctttcttctctgtccctggggatggggtggtctgtgaatatgtgacatttctgcagttcagtatccgaaggtttctcttgggggtaggggctcctgggcggccagatgaatgggtccctgggaacccagacctcagatgaggacttaatgtcttcttcctctcaagccaaattcgcctccacccactccctctgaagaactgggcatttgccaaagtaaccactggagtcatctaatggccctccccctccccaggtttcccacagctttcagggacagtgggcaagaggacacccccccccaccacctcagtggaacacaccattctccccccctcaacagcacactcagtgcagcaagactgacccctgaccccctcccagccctccctaccttggacaggaaggaagtaatgcaccttctcttgctgattatttatttgtttggagagacagaaatgtaaaagtgtatctagaaatatctatatctctatatatttttaactgactctttggaatcccctggggtggggtgaggggtaagtttaggctttcgcggaggggaggagacatggagcctgggaactccttgttctcccctctgctgcctctccccaccccttaaagcagttggtagaaggaatggtatttgtatggggggagggaggctggaatggagaatctggattctctcctcttccccattctccagagggagggaggtggtgaggaagaggaagggaggggcaggatgggccatggaggtgccccacccccacacctgacaatcacccacactcctggggctcttcctgggtcctggggcagggcgagtccaagtgtgaggctgttgatttgttttcaatatttcttttcgtgctgtatggtgatgctttcttagtattctacacaataagaaaagacaaagtcctcgagattcttatgagttttgtttgaaaactctttcactatatttgttgtaaagaggtttactattaaaagaaaaagaatacacgtttctgata

SEQ ID NO: 1040 - DNA, 5690 bp, synthetic construct
  misc_feature 1..5690: note = Synthetic
  source 1..5690: mol_type = other DNA
ggtagtgggttggggtgtgtgagtgtgtgtgtctccggggcccgtgtttgccgggtgcctgtggagttgggacgcggagtcgccacgaggaggctgtgcagaaggtatcctgcagaccatgaactgagcactgttcccagaccgttcatgagcacagtgtaaggtgtgccgagacccaccacccagcgagcccctcccctccgtagcactgaggacccccggagaagatggggaggaaaaagattcagatccagcgaatcaccgacgagcggaaccgacaggtgactttcaccaagcggaagtttggcctgatgaagaaggcgtatgagctgagcgtgctatgtgactgcgagatcgcactcatcatcttcaaccactccaacaagctgttccagtacgccagcaccgacatggacaaggtgctgctcaagtacacggagtacaatgagccacacgagagccgcaccaacgccgacatcatcgagaccctgaggaagaagggcttcaacggctgcgacagccccgagcccgacggggaggactcgctggaacagagccccctgctggaggacaagtaccgacgcgccagcgaggagctcgacgggctcttccggcgctatgggtcaactgtcccggcccccaactttgccatgcctgtcacggtgcccgtgtccaatcagagctcactgcagttcagcaatcccagcggctccctggtcaccccttccctggtgacatcatccctcacggacccgcggctcctgtccccccagcagccagcactacagaggaacagtgtgtctcctggcctgccccagcggccagctagtgcgggggccatgctggggggtgacctgaacagtgctaacggagcctgccccagccctgttgggaatggctacgtcagtgctcgggcttcccctggcctcctccctgtggccaatggcaacagcctaaacaaggtcatccctgccaagtctccacccccacctacccacagcacccagcttggagcccccagccgcaagcccgacctgcgagtcatcacttcccaggcaggaaaggggttaatgcatcacttgaacaatgcccagcgccttggggtctcccagtctactcattcgctcaccaccccagtggtttctgtggcaacgccgagtttactcagccagggcctccccttctcttccatgcccactgcctacaacacagattaccagttgaccagtgcagagctctcctccttaccagcctttagttcacctggggggctgtcgctaggcaatgtcactgcctggcaacagccacagcagccccagcagccgcagcagccacagcctccacagcagcagccaccgcagccacagcagccacagccacagcagcctcagcagccgcaacagccacctcagcaacagtcccacctggtccctgtatctctcagcaacctcatcccgggcagccccctgccccacgtgggtgctgccctcacagtcaccacccacccccacatcagcatcaagtcagaaccggtgtccccaagccgtgagcgcagccctgcgcctccccctccagctgtgttcccagctgcccgccctgagcctggcgatggtctcagcagcccagccgggggatcctatgagacgggagaccgggatgacggacggggggacttcgggcccacactgggcctgctgcgcccagccccagagcctgaggctgagggctcagctgtgaagaggatgcggcttgatacctggacattaaagtgacgattcccactcccctcctctcagcctccctgatgaagagttgacaatctcaccgcccgcccttccctgccccgggctcctcccgctcgacccccacttcctttcttgtgcttcgtgtcctgttgacggttacatttgtgtataattattatattattattattattattatattttttttaatttggattctcgctttggagagggggatgctctcatcccctctttctgtaccccccaccattttcactggctggggggctctctttttcgcgggaaggggggacactttgcacgttgtacacatatgctgcaggaagggggtggggggcccaataaggcctttgggaaaggacaggtgccgagccctgcatgtggagccctcccaccccacccccagatagagggaaataaccaaaaaactaccaaacaacagaaacccacactctagactgaaaccccaaagtgggcttgatgggtgggtttgtgtttcaaggggaaagtgaggcagaggttctgaaaagggtctctgtttttgtgttcatgtagccataggcacatggagcagaatacttaagcctggcccccaaatgcccctgcacacacacgtgccacacctgcgctgattcttgtgtgtgctgcacccccaaggtgtgtgggtgctggctgagctttgggccgggaaggcagcctgggaatctgaggctggagacaggggtttgaggtgggggcctctctggaagcacatttggagggaaagacaagagagccatgaggagagggctgaggagggcagaagggctaggcagggggcaaattgagcccctcccttccccagtttttctctaagatatacagtgcaatagctccccacccctcagttgacgccagccctgtaaagctggccacagtgtgcagggagaatggggagagggtcttcagtgaggtggctggggcgagagtcggcctggacttccctggggtgctccaggccagagctctttcattggggcgagtgtggtgaggggacgtccttggtcttgcacgcacactacctgggggagtcaacactgggatggtctgtggggtgggagggcctacggatgggtccgtagaggtcccacctccctcattcctccttggcccctctccctagcttctcctgttagctccttctgctcctgaccccacctccttgctcttggcgcccctattgtctctggctacctccttgtcccaccacctccaggctgcatcccaccttccctcttggctactgtaattgtaaatagcgacctttggaaaacgttagcggtgtaacagtccaggaaactgtttttttttgttgttgttgtattgatatgaaatgagattctatttttgtcaaagtatattgtaataataatgactcaaacggcccgtactgtacagacgagattcttctgctgttgttcttgctcccctcccctcctctgagtccgcccctccctgctgcctcctcagtggggcagtgggcaaggggcccaggggcagccgaagcacggggtcctgagacctcaggcaggattggagatcaaaccagagggggcaggcccccagcctgctctctaggatcaccccccgccctaaggggcctggcctggggtgacgtggccaggcagactgtctgccccactccttcacacaagcccagctcctctgcccaaggggtgcggcgcccccttggggtttcctcccagttggagagtagagttaagacaaggcccagttttgtgttagccgaccgtctttgcccacctctatgacccagcctcttgcagtattcccatacttgatgcagggaaggaaccagaagcagaggggcctctacgcaggtacacacgtgtacctgagtgtgttcatgagggcatctggtgtttatgtgtctgagtgtagctttgtatttatgtgtgtgtgtgtgtgtatgtctgattgcacgggtgtacttttgtatttatgtgtgtgtgtggttgcacgggtgtgcctctgtgtgtctctgaccctggctgggtgtgtgtgcaaatctgtgtgactggagctctaggggcatctctgtgtctgagtgtgcctggtgtgtgtttacaaagggagagttggctgctccagctccacagccctgggaccccaactcctgtcttccctgctcctttccctgtgttcaccctcagctctgacacattgaactgcagttggggggattggcagttagccctctgtgcttctccctgcagccctacctctgccaaggtctctccctccagggacctctgcttccacccacatatgtccacttagtcacccacacttgacacagttcctggagtaccctcttcccccaaccccagacctgctttcagagcaaaactcaagtccctcttcctccgtgaagcttctccctcagctgagcagtgatcacttactcactcttaaccccaatccgctgactgggtggggacagcacgtccagccttcccacctctcctgcaggcttctagacggagtttcaaaaactgatgagcctcgatccagggcttgaaagaagccagggtgtaatcttgttcatgcatgcgtccccagagcctcgcccagtgcctggcacatagtaggcactcaataaatgctgaatgggtgaatagttgaatgataggtgctcaataaatgaatgaatggccttcccttctcaggctattcccaccattagtctgcccacctttctaggctgggcttggccaccattaaacacggggtgggggtgagggcccctgcaattcacggtgcaatattcaccagttttgccctctgcctcataaaggcaaacctggcttttgattaccatgtgtggatgtttcagtgtcctttcttctctgtccctggggatggggtggtctgtgaatatgtgacatttctgcagttcagtatccgaaggtttctcttgggggtaggggctcctgggcggccagatgaatgggtccctgggaacccagacctcagatgaggacttaatgtcttcttcctctcaagccaaattcgcctccacccactccctctgaagaactgggcatttgccaaagtaaccactggagtcatctaatggccctccccctccccaggtttcccacagctttcagggacagtgggcaagaggacacccccccccaccacctcagtggaacacaccattctccccccctcaacagcacactcagtgcagcaagactgacccctgaccccctcccagccctccctaccttggacaggaaggaagtaatgcaccttctcttgctgattatttatttgtttggagagacagaaatgtaaaagtgtatctagaaatatctatatctctatatatttttaactgactctttggaatcccctggggtggggtgaggggtaagtttaggctttcgcggaggggaggagacatggagcctgggaactccttgttctcccctctgctgcctctccccaccccttaaagcagttggtagaaggaatggtatttgtatggggggagggaggctggaatggagaatctggattctctcctcttccccattctccagagggagggaggtggtgaggaagaggaagggaggggcaggatgggccatggaggtgccccacccccacacctgacaatcacccacactcctggggctcttcctgggtcctggggcagggcgagtccaagtgtgaggctgttgatttgttttcaatatttcttttcgtgctgtatggtgatgctttcttagtattctacacaataagaaaagacaaagtcctcgagattcttatgagttttgtttgaaaactctttcactatatttgttgtaaagaggtttactattaaaagaaaaagaatacacgtttctgata

SEQ ID NO: 1041 - DNA, 5690 bp, synthetic construct
  misc_feature 1..5690: note = Synthetic
  source 1..5690: mol_type = other DNA
agtgtgtgtgtctccggggcccgtgtttgccgggtgcctgtggagttgggacgcggagtcgccacgaggaggctgtgcagaaggtatcctgcagaccatgaactgagcactgttcccagaccgttcatgagcacagtgtaaggtgtgccgagacccaccacccagcgagcccctcccctccgtagcactgaggacccccggagaagatggggaggaaaaagattcagatccagcgaatcaccgacgagcggaaccgacaggtgactttcaccaagcggaagtttggcctgatgaagaaggcgtatgagctgagcgtgctatgtgactgcgagatcgcactcatcatcttcaaccactccaacaagctgttccagtacgccagcaccgacatggacaaggtgctgctcaagtacacggagtacaatgagccacacgagagccgcaccaacgccgacatcatcgagaccctgaggaagaagggcttcaacggctgcgacagccccgagcccgacggggaggactcgctggaacagagccccctgctggaggacaagtaccgacgcgccagcgaggagctcgacgggctcttccggcgctatgggtcaactgtcccggcccccaactttgccatgcctgtcacggtgcccgtgtccaatcagagctcactgcagttcagcaatcccagcggctccctggtcaccccttccctggtgacatcatccctcacggacccgcggctcctgtccccccagcagccagcactacagaggaacagtgtgtctcctggcctgccccagcggccagctagtgcgggggccatgctggggggtgacctgaacagtgctaacggagcctgccccagccctgttgggaatggctacgtcagtgctcgggcttcccctggcctcctccctgtggccaatggcaacagcctaaacaaggtcatccctgccaagtctccacccccacctacccacagcacccagcttggagcccccagccgcaagcccgacctgcgagtcatcacttcccaggcaggaaaggggttaatgcatcacttgactgaggaccatttagatctgaacaatgcccagcgccttggggtctcccagtctactcattcgctcaccaccccagtggtttctgtggcaacgccgagtttactcagccagggcctccccttctcttccatgcccactgcctacaacacagattaccagttgaccagtgcagagctctcctccttaccagcctttagttcacctggggggctgtcgctaggcaatgtcactgcctggcaacagccacagcagccccagcagccgcagcagccacagcctccacagcagcagccaccgcagccacagcagccacagccacagcagcctcagcagccgcaacagccacctcagcaacagtcccacctggtccctgtatctctcagcaacctcatcccgggcagccccctgccccacgtgggtgctgccctcacagtcaccacccacccccacatcagcatcaagtcagaaccggtgtccccaagccgtgagcgcagccctgcgcctccccctccagctgtgttcccagctgcccgccctgagcctggcgatggtctcagcagcccagccgggggatcctatgagacgggagaccgggatgacggacggggggacttcgggcccacactgggcctgctgcgcccagccccagagcctgaggctgagggctcagctgtgaagaggatgcggcttgatacctggacattaaagtgacgattcccactcccctcctctcagcctccctgatgaagagttgacaatctcaccgcccgcccttccctgccccgggctcctcccgctcgacccccacttcctttcttgtgcttcgtgtcctgttgacggttacatttgtgtataattattatattattattattattattatattttttttaatttggattctcgctttggagagggggatgctctcatcccctctttctgtaccccccaccattttcactggctggggggctctctttttcgcgggaaggggggacactttgcacgttgtacacatatgctgcaggaagggggtggggggcccaataaggcctttgggaaaggacaggtgccgagccctgcatgtggagccctcccaccccacccccagatagagggaaataaccaaaaaactaccaaacaacagaaacccacactctagactgaaaccccaaagtgggcttgatgggtgggtttgtgtttcaaggggaaagtgaggcagaggttctgaaaagggtctctgtttttgtgttcatgtagccataggcacatggagcagaatacttaagcctggcccccaaatgcccctgcacacacacgtgccacacctgcgctgattcttgtgtgtgctgcacccccaaggtgtgtgggtgctggctgagctttgggccgggaaggcagcctgggaatctgaggctggagacaggggtttgaggtgggggcctctctggaagcacatttggagggaaagacaagagagccatgaggagagggctgaggagggcagaagggctaggcagggggcaaattgagcccctcccttccccagtttttctctaagatatacagtgcaatagctccccacccctcagttgacgccagccctgtaaagctggccacagtgtgcagggagaatggggagagggtcttcagtgaggtggctggggcgagagtcggcctggacttccctggggtgctccaggccagagctctttcattggggcgagtgtggtgaggggacgtccttggtcttgcacgcacactacctgggggagtcaacactgggatggtctgtggggtgggagggcctacggatgggtccgtagaggtcccacctccctcattcctccttggcccctctccctagcttctcctgttagctccttctgctcctgaccccacctccttgctcttggcgcccctattgtctctggctacctccttgtcccaccacctccaggctgcatcccaccttccctcttggctactgtaattgtaaatagcgacctttggaaaacgttagcggtgtaacagtccaggaaactgtttttttttgttgttgttgtattgatatgaaatgagattctatttttgtcaaagtatattgtaataataatgactcaaacggcccgtactgtacagacgagattcttctgctgttgttcttgctcccctcccctcctctgagtccgcccctccctgctgcctcctcagtggggcagtgggcaaggggcccaggggcagccgaagcacggggtcctgagacctcaggcaggattggagatcaaaccagagggggcaggcccccagcctgctctctaggatcaccccccgccctaaggggcctggcctggggtgacgtggccaggcagactgtctgccccactccttcacacaagcccagctcctctgcccaaggggtgcggcgcccccttggggtttcctcccagttggagagtagagttaagacaaggcccagttttgtgttagccgaccgtctttgcccacctctatgacccagcctcttgcagtattcccatacttgatgcagggaaggaaccagaagcagaggggcctctacgcaggtacacacgtgtacctgagtgtgttcatgagggcatctggtgtttatgtgtctgagtgtagctttgtatttatgtgtgtgtgtgtgtgtatgtctgattgcacgggtgtacttttgtatttatgtgtgtgtgtggttgcacgggtgtgcctctgtgtgtctctgaccctggctgggtgtgtgtgcaaatctgtgtgactggagctctaggggcatctctgtgtctgagtgtgcctggtgtgtgtttacaaagggagagttggctgctccagctccacagccctgggaccccaactcctgtcttccctgctcctttccctgtgttcaccctcagctctgacacattgaactgcagttggggggattggcagttagccctctgtgcttctccctgcagccctacctctgccaaggtctctccctccagggacctctgcttccacccacatatgtccacttagtcacccacacttgacacagttcctggagtaccctcttcccccaaccccagacctgctttcagagcaaaactcaagtccctcttcctccgtgaagcttctccctcagctgagcagtgatcacttactcactcttaaccccaatccgctgactgggtggggacagcacgtccagccttcccacctctcctgcaggcttctagacggagtttcaaaaactgatgagcctcgatccagggcttgaaagaagccagggtgtaatcttgttcatgcatgcgtccccagagcctcgcccagtgcctggcacatagtaggcactcaataaatgctgaatgggtgaatagttgaatgataggtgctcaataaatgaatgaatggccttcccttctcaggctattcccaccattagtctgcccacctttctaggctgggcttggccaccattaaacacggggtgggggtgagggcccctgcaattcacggtgcaatattcaccagttttgccctctgcctcataaaggcaaacctggcttttgattaccatgtgtggatgtttcagtgtcctttcttctctgtccctggggatggggtggtctgtgaatatgtgacatttctgcagttcagtatccgaaggtttctcttgggggtaggggctcctgggcggccagatgaatgggtccctgggaacccagacctcagatgaggacttaatgtcttcttcctctcaagccaaattcgcctccacccactccctctgaagaactgggcatttgccaaagtaaccactggagtcatctaatggccctccccctccccaggtttcccacagctttcagggacagtgggcaagaggacacccccccccaccacctcagtggaacacaccattctccccccctcaacagcacactcagtgcagcaagactgacccctgaccccctcccagccctccctaccttggacaggaaggaagtaatgcaccttctcttgctgattatttatttgtttggagagacagaaatgtaaaagtgtatctagaaatatctatatctctatatatttttaactgactctttggaatcccctggggtggggtgaggggtaagtttaggctttcgcggaggggaggagacatggagcctgggaactccttgttctcccctctgctgcctctccccaccccttaaagcagttggtagaaggaatggtatttgtatggggggagggaggctggaatggagaatctggattctctcctcttccccattctccagagggagggaggtggtgaggaagaggaagggaggggcaggatgggccatggaggtgccccacccccacacctgacaatcacccacactcctggggctcttcctgggtcctggggcagggcgagtccaagtgtgaggctgttgatttgttttcaatatttcttttcgtgctgtatggtgatgctttcttagtattctacacaataagaaaagacaaagtcctcgagattcttatgagttttgtttgaaaactctttcactatatttgttgtaaagaggtttactattaaaagaaaaagaatacacgtttctgata

SEQ ID NO: 1042 - DNA, 5986 bp, synthetic construct
  misc_feature 1..5986: note = Synthetic
  source 1..5986: mol_type = other DNA
gcttccgagacccctgatgtggtttgtcagtaaccccaactggagaactccctggccagaagtttgcagctgttcaacatctgggcaagagttctctagtcctttccacctatggcaggcggagctgggctgcgagcgggggtttagggagtttgggggggcttttgggaggatgggccaaggagaccaaaatgcttttagtcccccactccaatgccagcttctctcctaccaggttcgggtcttagggggatggggaaaggggccccctccccctagtgaatcacgctgtcctctcagcagccttccgaggactcctcctgaaaggaaggcactctagaagccaccgaccgggttatcccaggaggctgtgcagaaggtatcctgcagaccatgaactgagcactgttcccagaccgttcatgagcacagtgtaaggtgtgccgagacccaccacccagcgagcccctcccctccgtagcactgaggacccccggagaagatggggaggaaaaagattcagatccagcgaatcaccgacgagcggaaccgacaggtgactttcaccaagcggaagtttggcctgatgaagaaggcgtatgagctgagcgtgctatgtgactgcgagatcgcactcatcatcttcaaccactccaacaagctgttccagtacgccagcaccgacatggacaaggtgctgctcaagtacacggagtacaatgagccacacgagagccgcaccaacgccgacatcatcgagaccctgaggaagaagggcttcaacggctgcgacagccccgagcccgacggggaggactcgctggaacagagccccctgctggaggacaagtaccgacgcgccagcgaggagctcgacgggctcttccggcgctatgggtcaactgtcccggcccccaactttgccatgcctgtcacggtgcccgtgtccaatcagagctcactgcagttcagcaatcccagcggctccctggtcaccccttccctggtgacatcatccctcacggacccgcggctcctgtccccccagcagccagcactacagaggaacagtgtgtctcctggcctgccccagcggccagctagtgcgggggccatgctggggggtgacctgaacagtgctaacggagcctgccccagccctgttgggaatggctacgtcagtgctcgggcttcccctggcctcctccctgtggccaatggcaacagcctaaacaaggtcatccctgccaagtctccacccccacctacccacagcacccagcttggagcccccagccgcaagcccgacctgcgagtcatcacttcccaggcaggaaaggggttaatgcatcacttgactgaggaccatttagatctgaacaatgcccagcgccttggggtctcccagtctactcattcgctcaccaccccagtggtttctgtggcaacgccgagtttactcagccagggcctccccttctcttccatgcccactgcctacaacacagattaccagttgaccagtgcagagctctcctccttaccagcctttagttcacctggggggctgtcgctaggcaatgtcactgcctggcaacagccacagcagccccagcagccgcagcagccacagcctccacagcagcagccaccgcagccacagcagccacagccacagcagcctcagcagccgcaacagccacctcagcaacagtcccacctggtccctgtatctctcagcaacctcatcccgggcagccccctgccccacgtgggtgctgccctcacagtcaccacccacccccacatcagcatcaagtcagaaccggtgtccccaagccgtgagcgcagccctgcgcctccccctccagctgtgttcccagctgcccgccctgagcctggcgatggtctcagcagcccagccgggggatcctatgagacgggagaccgggatgacggacggggggacttcgggcccacactgggcctgctgcgcccagccccagagcctgaggctgagggctcagctgtgaagaggatgcggcttgatacctggacattaaagtgacgattcccactcccctcctctcagcctccctgatgaagagttgacaatctcaccgcccgcccttccctgccccgggctcctcccgctcgacccccacttcctttcttgtgcttcgtgtcctgttgacggttacatttgtgtataattattatattattattattattattatattttttttaatttggattctcgctttggagagggggatgctctcatcccctctttctgtaccccccaccattttcactggctggggggctctctttttcgcgggaaggggggacactttgcacgttgtacacatatgctgcaggaagggggtggggggcccaataaggcctttgggaaaggacaggtgccgagccctgcatgtggagccctcccaccccacccccagatagagggaaataaccaaaaaactaccaaacaacagaaacccacactctagactgaaaccccaaagtgggcttgatgggtgggtttgtgtttcaaggggaaagtgaggcagaggttctgaaaagggtctctgtttttgtgttcatgtagccataggcacatggagcagaatacttaagcctggcccccaaatgcccctgcacacacacgtgccacacctgcgctgattcttgtgtgtgctgcacccccaaggtgtgtgggtgctggctgagctttgggccgggaaggcagcctgggaatctgaggctggagacaggggtttgaggtgggggcctctctggaagcacatttggagggaaagacaagagagccatgaggagagggctgaggagggcagaagggctaggcagggggcaaattgagcccctcccttccccagtttttctctaagatatacagtgcaatagctccccacccctcagttgacgccagccctgtaaagctggccacagtgtgcagggagaatggggagagggtcttcagtgaggtggctggggcgagagtcggcctggacttccctggggtgctccaggccagagctctttcattggggcgagtgtggtgaggggacgtccttggtcttgcacgcacactacctgggggagtcaacactgggatggtctgtggggtgggagggcctacggatgggtccgtagaggtcccacctccctcattcctccttggcccctctccctagcttctcctgttagctccttctgctcctgaccccacctccttgctcttggcgcccctattgtctctggctacctccttgtcccaccacctccaggctgcatcccaccttccctcttggctactgtaattgtaaatagcgacctttggaaaacgttagcggtgtaacagtccaggaaactgtttttttttgttgttgttgtattgatatgaaatgagattctatttttgtcaaagtatattgtaataataatgactcaaacggcccgtactgtacagacgagattcttctgctgttgttcttgctcccctcccctcctctgagtccgcccctccctgctgcctcctcagtggggcagtgggcaaggggcccaggggcagccgaagcacggggtcctgagacctcaggcaggattggagatcaaaccagagggggcaggcccccagcctgctctctaggatcaccccccgccctaaggggcctggcctggggtgacgtggccaggcagactgtctgccccactccttcacacaagcccagctcctctgcccaaggggtgcggcgcccccttggggtttcctcccagttggagagtagagttaagacaaggcccagttttgtgttagccgaccgtctttgcccacctctatgacccagcctcttgcagtattcccatacttgatgcagggaaggaaccagaagcagaggggcctctacgcaggtacacacgtgtacctgagtgtgttcatgagggcatctggtgtttatgtgtctgagtgtagctttgtatttatgtgtgtgtgtgtgtgtatgtctgattgcacgggtgtacttttgtatttatgtgtgtgtgtggttgcacgggtgtgcctctgtgtgtctctgaccctggctgggtgtgtgtgcaaatctgtgtgactggagctctaggggcatctctgtgtctgagtgtgcctggtgtgtgtttacaaagggagagttggctgctccagctccacagccctgggaccccaactcctgtcttccctgctcctttccctgtgttcaccctcagctctgacacattgaactgcagttggggggattggcagttagccctctgtgcttctccctgcagccctacctctgccaaggtctctccctccagggacctctgcttccacccacatatgtccacttagtcacccacacttgacacagttcctggagtaccctcttcccccaaccccagacctgctttcagagcaaaactcaagtccctcttcctccgtgaagcttctccctcagctgagcagtgatcacttactcactcttaaccccaatccgctgactgggtggggacagcacgtccagccttcccacctctcctgcaggcttctagacggagtttcaaaaactgatgagcctcgatccagggcttgaaagaagccagggtgtaatcttgttcatgcatgcgtccccagagcctcgcccagtgcctggcacatagtaggcactcaataaatgctgaatgggtgaatagttgaatgataggtgctcaataaatgaatgaatggccttcccttctcaggctattcccaccattagtctgcccacctttctaggctgggcttggccaccattaaacacggggtgggggtgagggcccctgcaattcacggtgcaatattcaccagttttgccctctgcctcataaaggcaaacctggcttttgattaccatgtgtggatgtttcagtgtcctttcttctctgtccctggggatggggtggtctgtgaatatgtgacatttctgcagttcagtatccgaaggtttctcttgggggtaggggctcctgggcggccagatgaatgggtccctgggaacccagacctcagatgaggacttaatgtcttcttcctctcaagccaaattcgcctccacccactccctctgaagaactgggcatttgccaaagtaaccactggagtcatctaatggccctccccctccccaggtttcccacagctttcagggacagtgggcaagaggacacccccccccaccacctcagtggaacacaccattctccccccctcaacagcacactcagtgcagcaagactgacccctgaccccctcccagccctccctaccttggacaggaaggaagtaatgcaccttctcttgctgattatttatttgtttggagagacagaaatgtaaaagtgtatctagaaatatctatatctctatatatttttaactgactctttggaatcccctggggtggggtgaggggtaagtttaggctttcgcggaggggaggagacatggagcctgggaactccttgttctcccctctgctgcctctccccaccccttaaagcagttggtagaaggaatggtatttgtatggggggagggaggctggaatggagaatctggattctctcctcttccccattctccagagggagggaggtggtgaggaagaggaagggaggggcaggatgggccatggaggtgccccacccccacacctgacaatcacccacactcctggggctcttcctgggtcctggggcagggcgagtccaagtgtgaggctgttgatttgttttcaatatttcttttcgtgctgtatggtgatgctttcttagtattctacacaataagaaaagacaaagtcctcgagattcttatgagttttgtttgaaaactctttcactatatttgttgtaaagaggtttactattaaaagaaaaagaatacacgtttctgata

SEQ ID NO: 1043 - DNA, 8551 bp, synthetic construct
  misc_feature 1..8551: note = Synthetic
  source 1..8551: mol_type = other DNA
atagggaagagaagccagagggagactcttcaggttggggggagctaaaggagcagtagtaaggaagcttggagtgggaggtgccttggcccccgaggaggccttggggataggccctcattgattatggcccagcccctcagacccttctcctctaccgtgccctcagagggtccctctgctgtggtcgtccctggctcttatacccccagagaggcctggacctctccccattttgtcaactttctcttcctgaccagctgggccccctgctctccctggttggcactggatccagaatctcaggacttacgctggcctggtgtgggcccttggttggacactttgccacacacctgagtacctttatggggacaagggaagtccaggagcaagtgggtgggcccaacatttccctagttctatttgagtcaggccccctgcttctttgcccctctagtcgagagagtggtggccttactggaaaagaggagttgagggccttgacttaatacaggccttgacctcttggacacaggtcatcgttggtgttcatcaggttctataagtgggtatgaggatccgatgtgagcctggaacccatcatcaagggtcaggttctgagtctcatggcactgtggtgctgggattctccccatcccacgggaccatggctgggactctcgaggctctctcaggccagctggtttgaggcaactatctcttttttatagagaaggaggaaatggtggcaggccggcacaacctcagcatcactgtaattgctggtggcttttatgagccagtcatggggccggagtccggccaactgtctgtccttctgtcccagtttggtgacttactcatggagggaggggcggttaggtactagaagctgtgttctagaagctggacgtctgactgtattgtggtcgatgtcactctgtctatccatgatcacagcaggtaggatggagcttagacttcaggaagaacttcccagtggggaagctgggggggagagagatggctctaattttgcataggaaaggaggggaactcaaagcactttcttttccagtggctctcccgaaaggaaaggccttgacctttggcttggtggggtcggtgctatttggatctcggaatatttatcttctttttcctctccctgcttatggctgaaagtattctgaggcgtttgtcctggagctgtgggagaaatagccattaggcccctttcccccagtagtgggagctagataagggtctcatgtagacaggcatgcccaatgcagtccacagcatttagtggtacacatgcaggaaagtgtgcaacacatacacactggtatgtagacacccacagagcagctgctgcactgcgggaggtggggggtagtgaatggcaaagatgattaaaggattggagagttgggatggggttgaggggaccggaggcaagaaggcgaagggcatagcaagaactttgaagagagaagggctgactggagcaggagggattaaggttagaccacagatgggcaggcagagccctgtctgcaaaataaagagcatggcttgtgagtcaaggagccttggctgacttccatccctgccccttacccctcccccacgtgcccctctctgtgttcctggcacagcctgcctctgcccctcacactgaccgtgtgtccccgggtccctcctcttgggccccagctttccagatgtacagagtttcgcctttcggtgattaacacctgggtgttttggtggtttgtcgctggtctctgttgccctccccgctcaccctgatgagcaaggccactgtgaggcatcaagactacatctaagccatcaggcatctgggggtagatccttggcctaggtgatccccaaggccctcttcatctgacattttccttttcctgaggctgaggctacaagcctctctttcctgagagccaagttatgcttctggttagtcctggctggtgtggagacaggggaatgcattcattgattctgcacaggaccctgatagccaagggggcgggaggcacttgtgcctgtctgacttcttttctttctgctgtaggctgggaggggagggacatgtccgaagctctggcctgtcgctggccacacccaggtgggaccatatttactcatttaaacttaccctcccaggaggctctgggctctaggcctggtcactgaccttggcttggtgcctctggctggatgctgtggccactctcctaggagctgagcagacgaggaaaccatgcagagggagcttttttttttttttttgccccctggtcaaaggagctttaccctcagcattacccctcttgcccaactttccagtatactttgaagaccaaaaaccacaactttttaattttttttgaggtaggatcttgctctgttgtccaggctcgagtgcagtggtgccatcatggctcactgcagcctcccattcaagcgatcctccggcctcagccttccaggtagctgggactccaggtgtgagccatcgtgccccgcccaaaaaccaaaacttttgagatcccaatgaagagaggtgatgggttctcaaaagggaggaaggaaacttccatttcttatgttcctgtgtgccaagctttgtactgagcatgggaatataagaagactgtttctctctaaaactgtttttttgaattgggaaactgagtctcagagatgtaagtgacttttaagctttcctagttatgaagtataaagggcttttgtctgagattaaaggagagatcctgccctgcaggacggggcaatggaaaggaggcccacggagacctgagaggaggaggagaaattgaagggaagagaaaaccaggattcctcagcagagggcagagaatcagcctttggtggcaaggaggctgtgcagaaggtatcctgcagaccatgaactgagcactgttcccagaccgttcatgagcacagtgtaaggtgtgccgagacccaccacccagcgagcccctcccctccgtagcactgaggacccccggagaagatggggaggaaaaagattcagatccagcgaatcaccgacgagcggaaccgacaggtgactttcaccaagcggaagtttggcctgatgaagaaggcgtatgagctgagcgtgctatgtgactgcgagatcgcactcatcatcttcaaccactccaacaagctgttccagtacgccagcaccgacatggacaaggtgctgctcaagtacacggagtacaatgagccacacgagagccgcaccaacgccgacatcatcgagaccctgaggaagaagggcttcaacggctgcgacagccccgagcccgacggggaggactcgctggaacagagccccctgctggaggacaagtaccgacgcgccagcgaggagctcgacgggctcttccggcgctatgggtcaactgtcccggcccccaactttgccatgcctgtcacggtgcccgtgtccaatcagagctcactgcagttcagcaatcccagcggctccctggtcaccccttccctggtgacatcatccctcacggacccgcggctcctgtccccccagcagccagcactacagaggaacagtgtgtctcctggcctgccccagcggccagctagtgcgggggccatgctggggggtgacctgaacagtgctaacggagcctgccccagccctgttgggaatggctacgtcagtgctcgggcttcccctggcctcctccctgtggccaatggcaacagcctaaacaaggtcatccctgccaagtctccacccccacctacccacagcacccagcttggagcccccagccgcaagcccgacctgcgagtcatcacttcccaggcaggaaaggggttaatgcatcacttgactgaggaccatttagatctgaacaatgcccagcgccttggggtctcccagtctactcattcgctcaccaccccagtggtttctgtggcaacgccgagtttactcagccagggcctccccttctcttccatgcccactgcctacaacacagattaccagttgaccagtgcagagctctcctccttaccagcctttagttcacctggggggctgtcgctaggcaatgtcactgcctggcaacagccacagcagccccagcagccgcagcagccacagcctccacagcagcagccaccgcagccacagcagccacagccacagcagcctcagcagccgcaacagccacctcagcaacagtcccacctggtccctgtatctctcagcaacctcatcccgggcagccccctgccccacgtgggtgctgccctcacagtcaccacccacccccacatcagcatcaagtcagaaccggtgtccccaagccgtgagcgcagccctgcgcctccccctccagctgtgttcccagctgcccgccctgagcctggcgatggtctcagcagcccagccgggggatcctatgagacgggagaccgggatgacggacggggggacttcgggcccacactgggcctgctgcgcccagccccagagcctgaggctgagggctcagctgtgaagaggatgcggcttgatacctggacattaaagtgacgattcccactcccctcctctcagcctccctgatgaagagttgacaatctcaccgcccgcccttccctgccccgggctcctcccgctcgacccccacttcctttcttgtgcttcgtgtcctgttgacggttacatttgtgtataattattatattattattattattattatattttttttaatttggattctcgctttggagagggggatgctctcatcccctctttctgtaccccccaccattttcactggctggggggctctctttttcgcgggaaggggggacactttgcacgttgtacacatatgctgcaggaagggggtggggggcccaataaggcctttgggaaaggacaggtgccgagccctgcatgtggagccctcccaccccacccccagatagagggaaataaccaaaaaactaccaaacaacagaaacccacactctagactgaaaccccaaagtgggcttgatgggtgggtttgtgtttcaaggggaaagtgaggcagaggttctgaaaagggtctctgtttttgtgttcatgtagccataggcacatggagcagaatacttaagcctggcccccaaatgcccctgcacacacacgtgccacacctgcgctgattcttgtgtgtgctgcacccccaaggtgtgtgggtgctggctgagctttgggccgggaaggcagcctgggaatctgaggctggagacaggggtttgaggtgggggcctctctggaagcacatttggagggaaagacaagagagccatgaggagagggctgaggagggcagaagggctaggcagggggcaaattgagcccctcccttccccagtttttctctaagatatacagtgcaatagctccccacccctcagttgacgccagccctgtaaagctggccacagtgtgcagggagaatggggagagggtcttcagtgaggtggctggggcgagagtcggcctggacttccctggggtgctccaggccagagctctttcattggggcgagtgtggtgaggggacgtccttggtcttgcacgcacactacctgggggagtcaacactgggatggtctgtggggtgggagggcctacggatgggtccgtagaggtcccacctccctcattcctccttggcccctctccctagcttctcctgttagctccttctgctcctgaccccacctccttgctcttggcgcccctattgtctctggctacctccttgtcccaccacctccaggctgcatcccaccttccctcttggctactgtaattgtaaatagcgacctttggaaaacgttagcggtgtaacagtccaggaaactgtttttttttgttgttgttgtattgatatgaaatgagattctatttttgtcaaagtatattgtaataataatgactcaaacggcccgtactgtacagacgagattcttctgctgttgttcttgctcccctcccctcctctgagtccgcccctccctgctgcctcctcagtggggcagtgggcaaggggcccaggggcagccgaagcacggggtcctgagacctcaggcaggattggagatcaaaccagagggggcaggcccccagcctgctctctaggatcaccccccgccctaaggggcctggcctggggtgacgtggccaggcagactgtctgccccactccttcacacaagcccagctcctctgcccaaggggtgcggcgcccccttggggtttcctcccagttggagagtagagttaagacaaggcccagttttgtgttagccgaccgtctttgcccacctctatgacccagcctcttgcagtattcccatacttgatgcagggaaggaaccagaagcagaggggcctctacgcaggtacacacgtgtacctgagtgtgttcatgagggcatctggtgtttatgtgtctgagtgtagctttgtatttatgtgtgtgtgtgtgtgtatgtctgattgcacgggtgtacttttgtatttatgtgtgtgtgtggttgcacgggtgtgcctctgtgtgtctctgaccctggctgggtgtgtgtgcaaatctgtgtgactggagctctaggggcatctctgtgtctgagtgtgcctggtgtgtgtttacaaagggagagttggctgctccagctccacagccctgggaccccaactcctgtcttccctgctcctttccctgtgttcaccctcagctctgacacattgaactgcagttggggggattggcagttagccctctgtgcttctccctgcagccctacctctgccaaggtctctccctccagggacctctgcttccacccacatatgtccacttagtcacccacacttgacacagttcctggagtaccctcttcccccaaccccagacctgctttcagagcaaaactcaagtccctcttcctccgtgaagcttctccctcagctgagcagtgatcacttactcactcttaaccccaatccgctgactgggtggggacagcacgtccagccttcccacctctcctgcaggcttctagacggagtttcaaaaactgatgagcctcgatccagggcttgaaagaagccagggtgtaatcttgttcatgcatgcgtccccagagcctcgcccagtgcctggcacatagtaggcactcaataaatgctgaatgggtgaatagttgaatgataggtgctcaataaatgaatgaatggccttcccttctcaggctattcccaccattagtctgcccacctttctaggctgggcttggccaccattaaacacggggtgggggtgagggcccctgcaattcacggtgcaatattcaccagttttgccctctgcctcataaaggcaaacctggcttttgattaccatgtgtggatgtttcagtgtcctttcttctctgtccctggggatggggtggtctgtgaatatgtgacatttctgcagttcagtatccgaaggtttctcttgggggtaggggctcctgggcggccagatgaatgggtccctgggaacccagacctcagatgaggacttaatgtcttcttcctctcaagccaaattcgcctccacccactccctctgaagaactgggcatttgccaaagtaaccactggagtcatctaatggccctccccctccccaggtttcccacagctttcagggacagtgggcaagaggacacccccccccaccacctcagtggaacacaccattctccccccctcaacagcacactcagtgcagcaagactgacccctgaccccctcccagccctccctaccttggacaggaaggaagtaatgcaccttctcttgctgattatttatttgtttggagagacagaaatgtaaaagtgtatctagaaatatctatatctctatatatttttaactgactctttggaatcccctggggtggggtgaggggtaagtttaggctttcgcggaggggaggagacatggagcctgggaactccttgttctcccctctgctgcctctccccaccccttaaagcagttggtagaaggaatggtatttgtatggggggagggaggctggaatggagaatctggattctctcctcttccccattctccagagggagggaggtggtgaggaagaggaagggaggggcaggatgggccatggaggtgccccacccccacacctgacaatcacccacactcctggggctcttcctgggtcctggggcagggcgagtccaagtgtgaggctgttgatttgttttcaatatttcttttcgtgctgtatggtgatgctttcttagtattctacacaataagaaaagacaaagtcctcgagattcttatgagttttgtttgaaaactctttcactatatttgttgtaaagaggtttactattaaaagaaaaagaatacacgtttctgata

SEQ ID NO: 1044 - DNA, 6095 bp, synthetic construct
  misc_feature 1..6095: note = Synthetic
  source 1..6095: mol_type = other DNA
tgttgtccaggctcgagtgcagtggtgccatcatggctcactgcagcctcccattcaagcgatcctccggcctcagccttccaggtagctgggactccaggtgtgagccatcgtgccccgcccaaaaaccaaaacttttgagatcccaatgaagagaggtgatgggttctcaaaagggaggaaggaaacttccatttcttatgttcctgtgtgccaagctttgtactgagcatgggaatataagaagactgtttctctctaaaactgtttttttgaattgggaaactgagtctcagagatgtaagtgacttttaagctttcctagttatgaagtataaagggcttttgtctgagattaaaggagagatcctgccctgcaggacggggcaatggaaaggaggcccacggagacctgagaggaggaggagaaattgaagggaagagaaaaccaggattcctcagcagagggcagagaatcagcctttggtggcaaggaggctgtgcagaaggtatcctgcagaccatgaactgagcactgttcccagaccgttcatgagcacagtgtaaggtgtgccgagacccaccacccagcgagcccctcccctccgtagcactgaggacccccggagaagatggggaggaaaaagattcagatccagcgaatcaccgacgagcggaaccgacaggtgactttcaccaagcggaagtttggcctgatgaagaaggcgtatgagctgagcgtgctatgtgactgcgagatcgcactcatcatcttcaaccactccaacaagctgttccagtacgccagcaccgacatggacaaggtgctgctcaagtacacggagtacaatgagccacacgagagccgcaccaacgccgacatcatcgagaccctgaggaagaagggcttcaacggctgcgacagccccgagcccgacggggaggactcgctggaacagagccccctgctggaggacaagtaccgacgcgccagcgaggagctcgacgggctcttccggcgctatgggtcaactgtcccggcccccaactttgccatgcctgtcacggtgcccgtgtccaatcagagctcactgcagttcagcaatcccagcggctccctggtcaccccttccctggtgacatcatccctcacggacccgcggctcctgtccccccagcagccagcactacagaggaacagtgtgtctcctggcctgccccagcggccagctagtgcgggggccatgctggggggtgacctgaacagtgctaacggagcctgccccagccctgttgggaatggctacgtcagtgctcgggcttcccctggcctcctccctgtggccaatggcaacagcctaaacaaggtcatccctgccaagtctccacccccacctacccacagcacccagcttggagcccccagccgcaagcccgacctgcgagtcatcacttcccaggcaggaaaggggttaatgcatcacttgaacaatgcccagcgccttggggtctcccagtctactcattcgctcaccaccccagtggtttctgtggcaacgccgagtttactcagccagggcctccccttctcttccatgcccactgcctacaacacagattaccagttgaccagtgcagagctctcctccttaccagcctttagttcacctggggggctgtcgctaggcaatgtcactgcctggcaacagccacagcagccccagcagccgcagcagccacagcctccacagcagcagccaccgcagccacagcagccacagccacagcagcctcagcagccgcaacagccacctcagcaacagtcccacctggtccctgtatctctcagcaacctcatcccgggcagccccctgccccacgtgggtgctgccctcacagtcaccacccacccccacatcagcatcaagtcagaaccggtgtccccaagccgtgagcgcagccctgcgcctccccctccagctgtgttcccagctgcccgccctgagcctggcgatggtctcagcagcccagccgggggatcctatgagacgggagaccgggatgacggacggggggacttcgggcccacactgggcctgctgcgcccagccccagagcctgaggctgagggctcagctgtgaagaggatgcggcttgatacctggacattaaagtgacgattcccactcccctcctctcagcctccctgatgaagagttgacaatctcaccgcccgcccttccctgccccgggctcctcccgctcgacccccacttcctttcttgtgcttcgtgtcctgttgacggttacatttgtgtataattattatattattattattattattatattttttttaatttggattctcgctttggagagggggatgctctcatcccctctttctgtaccccccaccattttcactggctggggggctctctttttcgcgggaaggggggacactttgcacgttgtacacatatgctgcaggaagggggtggggggcccaataaggcctttgggaaaggacaggtgccgagccctgcatgtggagccctcccaccccacccccagatagagggaaataaccaaaaaactaccaaacaacagaaacccacactctagactgaaaccccaaagtgggcttgatgggtgggtttgtgtttcaaggggaaagtgaggcagaggttctgaaaagggtctctgtttttgtgttcatgtagccataggcacatggagcagaatacttaagcctggcccccaaatgcccctgcacacacacgtgccacacctgcgctgattcttgtgtgtgctgcacccccaaggtgtgtgggtgctggctgagctttgggccgggaaggcagcctgggaatctgaggctggagacaggggtttgaggtgggggcctctctggaagcacatttggagggaaagacaagagagccatgaggagagggctgaggagggcagaagggctaggcagggggcaaattgagcccctcccttccccagtttttctctaagatatacagtgcaatagctccccacccctcagttgacgccagccctgtaaagctggccacagtgtgcagggagaatggggagagggtcttcagtgaggtggctggggcgagagtcggcctggacttccctggggtgctccaggccagagctctttcattggggcgagtgtggtgaggggacgtccttggtcttgcacgcacactacctgggggagtcaacactgggatggtctgtggggtgggagggcctacggatgggtccgtagaggtcccacctccctcattcctccttggcccctctccctagcttctcctgttagctccttctgctcctgaccccacctccttgctcttggcgcccctattgtctctggctacctccttgtcccaccacctccaggctgcatcccaccttccctcttggctactgtaattgtaaatagcgacctttggaaaacgttagcggtgtaacagtccaggaaactgtttttttttgttgttgttgtattgatatgaaatgagattctatttttgtcaaagtatattgtaataataatgactcaaacggcccgtactgtacagacgagattcttctgctgttgttcttgctcccctcccctcctctgagtccgcccctccctgctgcctcctcagtggggcagtgggcaaggggcccaggggcagccgaagcacggggtcctgagacctcaggcaggattggagatcaaaccagagggggcaggcccccagcctgctctctaggatcaccccccgccctaaggggcctggcctggggtgacgtggccaggcagactgtctgccccactccttcacacaagcccagctcctctgcccaaggggtgcggcgcccccttggggtttcctcccagttggagagtagagttaagacaaggcccagttttgtgttagccgaccgtctttgcccacctctatgacccagcctcttgcagtattcccatacttgatgcagggaaggaaccagaagcagaggggcctctacgcaggtacacacgtgtacctgagtgtgttcatgagggcatctggtgtttatgtgtctgagtgtagctttgtatttatgtgtgtgtgtgtgtgtatgtctgattgcacgggtgtacttttgtatttatgtgtgtgtgtggttgcacgggtgtgcctctgtgtgtctctgaccctggctgggtgtgtgtgcaaatctgtgtgactggagctctaggggcatctctgtgtctgagtgtgcctggtgtgtgtttacaaagggagagttggctgctccagctccacagccctgggaccccaactcctgtcttccctgctcctttccctgtgttcaccctcagctctgacacattgaactgcagttggggggattggcagttagccctctgtgcttctccctgcagccctacctctgccaaggtctctccctccagggacctctgcttccacccacatatgtccacttagtcacccacacttgacacagttcctggagtaccctcttcccccaaccccagacctgctttcagagcaaaactcaagtccctcttcctccgtgaagcttctccctcagctgagcagtgatcacttactcactcttaaccccaatccgctgactgggtggggacagcacgtccagccttcccacctctcctgcaggcttctagacggagtttcaaaaactgatgagcctcgatccagggcttgaaagaagccagggtgtaatcttgttcatgcatgcgtccccagagcctcgcccagtgcctggcacatagtaggcactcaataaatgctgaatgggtgaatagttgaatgataggtgctcaataaatgaatgaatggccttcccttctcaggctattcccaccattagtctgcccacctttctaggctgggcttggccaccattaaacacggggtgggggtgagggcccctgcaattcacggtgcaatattcaccagttttgccctctgcctcataaaggcaaacctggcttttgattaccatgtgtggatgtttcagtgtcctttcttctctgtccctggggatggggtggtctgtgaatatgtgacatttctgcagttcagtatccgaaggtttctcttgggggtaggggctcctgggcggccagatgaatgggtccctgggaacccagacctcagatgaggacttaatgtcttcttcctctcaagccaaattcgcctccacccactccctctgaagaactgggcatttgccaaagtaaccactggagtcatctaatggccctccccctccccaggtttcccacagctttcagggacagtgggcaagaggacacccccccccaccacctcagtggaacacaccattctccccccctcaacagcacactcagtgcagcaagactgacccctgaccccctcccagccctccctaccttggacaggaaggaagtaatgcaccttctcttgctgattatttatttgtttggagagacagaaatgtaaaagtgtatctagaaatatctatatctctatatatttttaactgactctttggaatcccctggggtggggtgaggggtaagtttaggctttcgcggaggggaggagacatggagcctgggaactccttgttctcccctctgctgcctctccccaccccttaaagcagttggtagaaggaatggtatttgtatggggggagggaggctggaatggagaatctggattctctcctcttccccattctccagagggagggaggtggtgaggaagaggaagggaggggcaggatgggccatggaggtgccccacccccacacctgacaatcacccacactcctggggctcttcctgggtcctggggcagggcgagtccaagtgtgaggctgttgatttgttttcaatatttcttttcgtgctgtatggtgatgctttcttagtattctacacaataagaaaagacaaagtcctcgagattcttatgagttttgtttgaaaactctttcactatatttgttgtaaagaggtttactattaaaagaaaaagaatacacgtttctgata

SEQ ID NO: 1045 - DNA, 32306 bp, synthetic construct
  misc_feature 1..32306: note = Synthetic
  source 1..32306: mol_type = other DNA
agtgctccgccgcagcgacccgcgggccggcgggcgatcgagccagcgcaggacccgcggctcggcccccggccgccgccggaccgagagtctagccgccgcccccagcccagcccgcccggccgcaggaccgccggggcctggccgccggtccggcgtgcgccaagttcaggtgggagaggcgcggcggggccggccggccgcgtggacgcggccccgggtgatcagagggctggccggcctcggggcgcgtggccgtgctcccgcgcagctctcggaggcaccgcgcgagtgctggaggaatgtcggaggagcgggatgggcccccgcggaggtgggcaggggtcggactggcccgggggaggtgaccccccccgccccggtcgcccaccagcactttgctgaggcccgcgccgccgcctcggtgcctggccgggcgattccgtggcgcgccttgcgggccggccctcccatatggtgggcaccggcgcggcctggtgagaggagggggagagcggacgcgctggccagcccggggttggggggcggaggggctggagacggaggggttactgtcggtcaccgcagcagtgtcgggggcaaggggggggcgtgggacgagggcatggtgcccagcgggcagcggtccaggactctagaaggggtctgagccggctctcttcatttcccacgcacgtttcccctcacccgccggcacccacggcggctccacgcgcgagtccttcgcggacagcctcccgcacagccacagcggctgccgcgcaccacgccccgcacacgcagtcacacgacaggaactcacaccccttcacgcacacccgcaccgttcacgcgtctcactccacgctgagtccccgtccgctcagaccgaacattaccaaagccatggcctgaccgagggatggcggcggcggggcagagaggccgtccccatcccatatggtggtccggttcactcttccctccccgccttggtgttactcatggaacccccctctcacggagggcacagaggggctgttttctcccacggccctcggaggtgacaaaatcaacaattgtttgagagcctcaaatctccttccccctgtccccccggaccaggtggcccctggggagaccctgccgccctacaggtgtgaggacgcccggactctgcgactttggggcctgcgggcggctcagggaccggagactcttattttgaaggacagcccccgccgccacccccgtgatttgcacgctgacccaatggcaagcccttggccggcgctgggcttgttatcaattacatgttgttcctgcagccgctgtgtccccgggaggataaacagcaggcctggccgggccaggggagggggcggagtccggcggccagccggggactgtgcccggaacagcgtgtcccctccccctgcacgcagcctgcgcctctggccgccccacgtgctgctgtgtttcaggggccgagccagctccagccctagagtgtcctctctttaatgccggtgccctgggacatcccagagccctttctgggttgtcagtgcctgggtgcttcccccttgggacgttcagcccagcattaagaccctgttggctgacctgggccacccattcctactctccgacctcccccgctctcccccgcaccttccattcactcattcagcaaattttgcccggtcctgttttagactctgggatatggccttggagtgaacagtcaggacagctgatattctgatgggaaggtagacagggaggaaagttcacaaacacatcaccaagatagtttcccacagtagaaactgcagggaagagtataatataggatgatgtaacagagtgggcctggaggcccccacaggggtgacttctgagccgagatctaactaagcagctcccacctgcagtgctgggggaagagccagggcagtggccccgggctgaggctgaagtgaagtgagcacacctggactagaagagaggcagttggtggtgaggtctgcagagagtcccaagggcccaggtgctgggctgctgcgaggagatagggccacctgtccttgggaagccattggagggtgtttccttccagcccccctactgtactttttagatcactttatctgtcaatatctgtttatatgtttaaaaggtaaggcctcctttaaccacaatatgatcatcacaattaaaaatattaacagtaattacttaatatcatgggatggccagttagtgatcacgtttcaggggagggctctaaggcctgctctgggtcccaggagggctggaggcccctgattccttaacatcacagtagaggggcagaggccgaacgtttgccgtgcctgcaggctgacaccaatggctggcactggctgagtgctgccggtgtgccagatcctgaggggggtgcttagtgagcgtcagctcacggaattctcacaacacctgaggaaccaggcactgttggaagcacccccatctcacagactgagacagacacagaaaggctgtgcacctgcctgaggtcacctggcagacaacttgcagactcagaaatggagcccctgcttggagggtgggaaagggttgggggaggcccagggtggagtgtgggctctgcccagccttgtgcccttcacagtgtctagcactttcattccttcccagcacctgatttggtgaataggtgcattttaaaacatattccaggtttaaatccttagctgagtatttaaaccaaaaagccaaatgtcctcctagtaaaactggcctggggcacagaccttgccttagtttcctggagctccgtgaagcttcctgggtaagttgggaactggggctaaaggtcctggggtccctgagcaggaagagacttagagatctttgaagcatggaacagatgaggaaactaaggtttgggaaggggagcaaggacttgctcaaggttgtagctgatgatggtattggccattgggcagtgccgggtgccaggccctgaaggggtcctggagacagaggggctgggtgtagaggtgatgctgggcagcagagaacctctgactttggtgcagagcattccccttccccaagcttgataaacacccagcctgccctggtcactgagcagggacaaaggttcacagaggtggccccgtcacagctggacactattgactctccttggcaccagacctagcatgtccttggcttcagaggatgcagctttcccttctcctctctatcaaagttctctgagcccctgctgggcaccagcggccagtccaggcactggggacgcagcagagacatggagtgcactgtctcagggggagacaggcattagctgaaccttcgcaaggcggtgagtgtcccagatggagagagcaatggcagagagtgcaggggactccacttccttattggtcaggatgggctgggggggtggttgtctcctttcccactagatgggtgtgaagtccaaggcagttaggcacatgcgggtgctctgggaccccagtggtctgcttccactccacggattatcaccagaggggcagggccttggccaccaggatgctcaagcatcagggtgcaggtgagagggttgcgttcaagcctgtgccactcacagggcagtcaaggctcagaggggtttgaggactggagagtggaggagctttaggtggggaaacagctgcgcaggcaggcactttttggtctttgactgttttgcctacatgctacacttgcccagttaaaatgcaggcggcctagttaaatttgaatctcaggtgaaataatttttaaatgtaagtgtgtcctatccaatattgggaacatacttatattaaaaatagtttattttttaaatctgaaattcgaatgtaactgttggcttgtatttttatttgcgtaatctggcaaccctctggaagcctcagcaacatgagggtcagagggcaaatggctgttctacccccattctgtgactcaacaggcgtgaagctgaggtcaggagtcctcagatgtacagtgactcctatgatgttgacggtgggctgattcagggctttggccctcctggggtccagagagcctcctcgcgcatgcccttctctcatactcacccatactcagttgttcacagacatatgtgctattttccaggataattctggaaaatctgtttgaaaccagaagtgcccctggttatgcaatgggcttggagaggtctcttttgcaaacaggtggtgcaatttcagaaaacactcttgcaggcacagctctcctgggggatggaagcaggatccaggcgtttggcaataggaggctgtgggcaggcagctgagggtggggtcagaggcctgcgaggtggcaggtgagcactgtccttctgaccaggcctcctgtgttcctttcctgcagccgccaccggcacggccaggccagcatggtggaccacttacttccagtggacgagaacttctcgtcgccaaaatgcccagttgggtatctgggtgataggctggttggccggcgggcatatcacatgctgccctcacccgtctctgaagatgacagcgatgcctccagcccctgctcctgttccagtcccgactctcaagccctctgctcctgctatggtggaggcctgggcaccgagagccaggacagcatcttggacttcctattgtcccaggccacgctgggcagtggcgggggcagcggcagtagcattggggccagcagtggccccgtggcctgggggccctggcgaagggcagcggcccctgtgaagggggagcatttctgcttgcccgagtttcctttgggtgatcctgatgacgtcccacggcccttccagcctaccctggaggagattgaagagtttctggaggagaacatggagcctggagtcaaggaggtccctgagggcaacagcaaggacttggatgcctgcagccagctctcagctgggccacacaagagccacctccatcctgggtccagcgggagagagcgctgttcccctccaccaggtggtgccagtgcaggaggtgcccagggcccaggtgggggccccacgcctgatggccccatcccagtgttgctgcagatccagcccgtgcctgtgaagcaggaatcgggcacagggcctgcctcccctgggcaagccccagagaatgtcaaggttgcccagctcctggtcaacatccaggggcagaccttcgcactcgtgccccaggtggtaccctcctccaacttgaacctgccctccaagtttgtgcgcattgcccctgtgcccattgccgccaagcctgttggatcgggacccctggggcctggccctgccggtctcctcatgggccagaagttccccaagaacccagccgcagaactcatcaaaatgcacaaatgtactttccctggctgcagcaagatgtacaccaaaagcagccacctcaaggcccacctgcgccggcacacgggtgagaagcccttcgcctgcacctggccaggctgcggctggaggtcagtatagcgagtgacaggcctgggcagtgagcacagccactcatgtctgcttacttgggtgtgcagcagggccattttccaccattaacagaaggtagatgagggaggggagggaggggcaggcgggtgcaggcccagagctggcacagttgcctggaggcttccttggtcctcctggttcctgaagccggaagccaactggtgtccagtttcctgatggccaggtaaggcttcactggcctgtgctgccagctgggtctccccatccagtctgacaagggtggggattgaggggctggcgaggaaggatgagtgcggtctaggggccaggcagcggctccctttgggcccacagccccacagggtaagtaccaccatcactcccaacttacatcacaggacactagggctccgactggccaggtacttgcccaaggtcactctgctttgtgaatgggatttgaacccagaggccggattcgagaggtcacatcctgaaaatgctgcttccccaaccagtgggactagcttcattcacagatgtctctggacacatgggctgggcctcgcctatgcttcctccctggggacgtggaagcatgtttgggaggctgcaaaggccaacccagagggaggctaggccagctggtggtgctgtcacaggtggcagaacccaggctgtctggtctgcatggcagtggggaaatcaggcctcaaatggtaactggtagtctcccaaccagggagcacccttccctgagcaccgggtgctgctcaacctccttgggagtggctgtccaccttttcctgaaatgtaggctgcttgcgaagagctcatgtgctccggggtgccagagccagccctctgcagttcctgatgcccatcccaaaggaatctctggcctgcctggggggcgctgtgtgctgttggcacattccaaatctttgctgctgtggctgctgctacgtgtgtgagacggggcacactcatctgtatccctgggggtgtatacaggcctgggcctcgccagcaggtgtgtggctgtgtgtgtgcacacccacatgtgtatgcatcttgctttctttgtgtctgtctgtgccgtgtgaccatatgtgtttgcacacatacatgtcttaggtgtttgtgcaccatgtgtggctgcctgtgtgtgcatgtgttatgtgtgggtgcaacacccggggagcagtttgcagcttttgttttcttgaccatactctggttctgagagctcttgagagttgtctggggcagaggttctggccagtgaggctgagctgtggtcagggagctgtgagtggaatgtatgttgtggcactggtgccacctttccattgagtgccaatctggccagagaagggaattttcctgaacagtgtctaggtttatggaggcccctcctgagtgaggacatcactctgtcctgtctcccaccccattcagacagaccggagaggcttctgtgagagcccaccctggggcctcacaaggtctccatcctggagtccccacctctctgagctttgtacctaggcctgccgagtgggtgcatggctgacaggttgcttgtgagaggaggacacagcagcaagtacactgcataggaggttagaggagccgagagaagggccaggagtgctcttgattgaagcaggaaacttgtgcagagaaggcgagggcacaggtatgtgggggctgtggtcttgagcctacgcctgggtcagccactaacttgtcatgtgcctttggggtggtccccctccaaacctcagtttcctgtctgcagagtggagggctagccctttgcagcccagggcaggcgtgcagggctccacagcggcctccttgttgtttgtacatcataaggatacaaactcatacacggcagtttctgaggaggaaccctgaaggcattctctccagcccccaagagggtggtgcctattgtgaagggaccccctactcccagggaccctgtatgcactctcctcttggtgagggcgggcaggggctgcagagaggcagggaaacctccctccaagcaccagtctggactccttagtcgggctcaggtttcagcgccgtctcctggccatagtcgaccgttggcaagtagctcctctagatgccgtgaggctgggtagggtgatggggagggcaggtgtggtcctcatccaaggccagccttcttcctggatatcttagggccagagagctgataggcccctcagcccaaagtgtatctcagtgaggcagatcttagttctctatacagtggcctcaggaggtaatgagttcctcatggcagggggtgtacatgagagagtggggacctgtggaggggattcagctctgacacatctgagccctggcactggtcgtgctgcccaggacccacttggcaagagaaggtgtagtggttgcctggcccagtgagatcacagtggcactgcccccaggagctgtccctgctgccagccatgccccgggcttcctgagggctcctccagcttcccccaaggtcccctggagtgggtctggccctggtggggtaactcatggcagaggcgctgttcggctgggagctgaggacaccggcctctagggagggctgcttttctgaggatgcggggagtcctcagctggctttcagggatcttgaaaccctggggatgtgcccagtctgcttgtgtctcttaatgtggtgatagtcttcaactgagagggagcccctgcagctccttacagcagtcaggagggaggatggaccccgctttggggcagctgggtctggacaggactggaagggtaacgatgatgatggtgagatggcgtatttactgaccactcactgtatgctgggcactattctaagtttctcagagctggaatcccctccgcccactattgtaacttgcatacttcctgccatggggagctcattaccttctgaggcctttaagtgtactttgctgtgcttcagtttctattcaagcttctcgttctggcccatagacccacacaatgtgcttacctgtctcttccccttactgagtgggatccagccacgctggcctccctgctgtggctcaggctcccgcgtgggcatccgccctctctgtgccctctgtctcaaatgacccctgcccttgaggctgtagtgacagcttaaggttttcgcattagctcatcaggtccttgtaactgcctggtaaagtgtaggcaccaatcttcattttacagagagggaaactgaggcacagactgctcacgtcacatgcccacagggacatagctagtgagcaaggatctgggttgcatgactaagccctagcagagccctgctctggccacctggtggtcctagctggtatcagagtcgccatgtgtgcctccagtctcccaccaagaggtcggcccaaaaggcattatgcttctgggctatgggaaaagagctaacgaccacaatcgagataataaccagggcctctaatgcatacttggcactgctctgagcaaaattcacacatattaatttacgtaattctcaaaattagtaggcatcagcatgttgtccctatttcacagaggagagaattaaagcacagaagagttaggtaaattctccagtcagccagccagtaagccccagagccaggagttcagctgaggctgtctgcccagaatcagggacctccctctgcaccccggtgttgggtgctaactctggtgttgggaacctccacctccatctgcagctcagcctggtctttggggtggcagctctacacactcacctactccccgtgggggagctctccactcccaggccgcgtctcttcttcctggtggcctagatgaatgggatgctctttctgcccaggctggctctggcctagtaccatgtcctgtgctcggagaacaagccagggcccctcaggcccctcatacctctgtgtaatggacagtgccctccctccactgctgaggtcgtcacctgcccaggtactcagcctccacttccttctgcttttggtcctaagagtactccctgtcccttctctggtgacatgattttggcaccctcaacagggctgagagcaggctttccctgttctgatccagccgtctgggaagtgctgcttgcctgccttcctagaagtttccttgcctcactgtcagacataggcatcctttgttccttgcagcagaacgtcctgttccagaatggccaagccattccatccagaaagaatcccttctgctgcagtgaatatgaatatgaataactgtcatcagcctgtagggtgggtacttttgtcgtccacagtggatgtggtgggggacagagaaggggagttccaggctcctcttgagcgtcagagccaagaggtggtaggtgcaggattcaaacttaggggtctggctcccagcctgctctcatgacccctctgcattgaggctttttctgacctccttccctctgtaggcagaggcccccagtatggttgggcaggttgtgaactgcacaactctagggagcaccatttccattgcagtttctgagactggactgtttgcggtgttgtctggcggatgagggttagtgtctcaaggaagggacgccttcatacagaagtgctgtatgcaccagccctgacattatagctgctctagagagacactggacccctgtgtaccctctgccctacagctcagcacaaatcatagtgctgccctgtctgcagcaggacccaccaggaaccaggcccaacactcaactccatgcaggtgataagagctcatcattcttgaataattgccacgtgctaagcagggctctaaaccgttactggttgccttgtacaatcctcacagtcctcaggaataggtcttttgttctccctttgtctgggtagagaaactgaggctcagggagcttggtgactttcctagtttgcctggttggtaagtggcagagcttactgcctacaagggctgcatcttacccaccgggttcccacatcccccactgtagtccccagggctctctgttggctgctgtttgggagaatgtggcatgcaggggtgaggcagggggtcttctgagggctcagttcccagggaagttcctctcaggtgccaggaccctgtggcagcagggagggaattcaggtgaggacagcatgttgtccagcttggttctatctcatctgcctgtccttcccagggtgtcaccatgaccagagatctgtgtggccccacgtcaccacctgtggcctttgagatgagtcttggaaggtgggcaggaatgccagagtcttcattggatgaatgaagaaattgaggcccagaaaggaccattcagggcacccagtggggtgggaactgtcaaggcaggagcctgagactctgtcccctgggctgtgtgacttggcctctttaaacccttgccatggtcttgccagtccaatggggctggctcatcctggttccctggccagtgagatgctgggtgaccccagggctgcagcctgggaggcgtggcactctgtgtctgcagctttctgcttacccctgccctgggccagctcctctgctcagaagctgtgtgcccagctgcagctgggggcaggtgtcctgcccaggagcacaggtgtcagctttgactgccagggcacatttatcccatttcctcactggcacagggccctgtgacacacacacccatccaggcctgtacaggaggctggggggctctgctgactgggagtccaggtcatctgccattgccagggcagggggctgtgtcaagacctctgctccagcctcaggggccctgtcttgtcagtgacctggaccaggccctcagcaccctgagcttcagtttcctcctctgacaggcagggcagttgggcttcacctagtctggagatgtgctgaaagcactgccctgtgcctggtgccaccaccactctgtgatgtgagtcggagttcctgtctcctcctgcaggccctcctgccaccccctgtgccttgtccagagcatgttctgctgggtccttctgctcttccacccacagggtcagggcgccagggcatcaccagcccttaccaattgctgggtgggaactgctgctctgggcaccgcctctcgctgggtggccctggtccacaaaggggtgttgggcctcgtgtccctgtgtgtgtgtgtgtgcgtgagtacatgggggcatgaatttgtgcctgtgtgtgtgtgtgtgtgagtatgtgtgggcacatattcgtccgtgtatgtttgtgtgcctgtatgtgtgggcatgtatttgtccgtgtgtgtgtgcgtgcatgctttgggactgctccttgacagtgtctgcccccctagggctgcttgctgtgcccactcttgcattgaaatccacctcctcagcacctaccatataccaggcattgggctggtcatgggaagaccaccgggaaccaagacaaacatgtcctttgtcatggagctgacagtctagtgggacagactgacagtcatcaaaaagttgaagataatttaaaatcaaaacaacagcaagaatgaggagagagaggtgtgtaatgccacaggagcctagaattggatgcagtcctggagggatttcctaaggaagtgacattcgagctgagctctaaggaatgggtaggagagagcaaggagggggagggaagaacattctagaaagagggaacagtatgtgcaaatggcctgtggcaagaaggaccaaggaaaggtcaatgcaggtggagcacagagcgggatagtgtgtcgtgggaggggtaggtggggtgggagggacctgctgccaagccaggggtggagagggcctcaaatccctgaggttggtggcaagcagtccaggccctcgatgcagcttgggctcttgactgtcacatgagtgcctgctcccaggccagcagggccaagaaagcgaaatgtcgggagccacctgaactcccagatacactttgcagggtcaatctttatttgggcctgccttagagggcccagcttccagcacagctggtttcaggagtgggtggactcaagtctgaggacctctctccctgtgctgcttcctcctcccaggcctccgtttcccctccggatgggcggtcctgtacaggccttcacagatgcccctgtggagttctggtccagtggggtagatgaggccagggtggtgagaggcagccagcatcagggcctgagcgactgagtgcacctgtggcctcagagacccctgcacactgggtgggctgtgggagggaagccctggtccctggtagcattggggtcctttcctgttgggagcttttaccagctgctctggcagttcccaacagagaatgcccactgtgccagcatgagcctttactgtagttctttccatcttggaggggtggcaggggcagcttggcacagtggctcacgcctttaatcccagcactttgggaagctgaagtagcctgatcgcttgagcccaggagtttgacaccagcctgggcaacatagggaggcctggtctctaaaaaaaaatacaaaaactatctgggtgtggtgggcacacctgtaatcctagctactctggaggctaaggaggattgattgagcccgggaggctgcagtgagctgtgatggcgccactgcactccagcctgtctcaaaaaaagaaaaaaaaatggtattttgagaactggtatagccttaccgacgtagatgggggaccctcccctaatcctgtagaggctgcaggtctgcgcagccaccctttgggtgagtgccaggtgcacgccttgcatcccggcaacttcgtggggtcggggcaggcaggggcaggcagggccaggcctcgctgaccgcgccatgtcccgcaggttctcgcgctctgacgagctgtcgcggcacaggcgctcgcactcaggtgtgaagccgtaccagtgtcctgtgtgcgagaagaagttcgcgcggagcgaccacctctccaagcacatcaaggtgcaccgcttcccgcggagcagccgctccgtgcgctccgtgaactgaaagcgccctgaaccccagcctgtccgtcaccccggatccccaccccatccccatttttttaagcaataatttatttgcctcctccagagggacatggcaatgttaccagcccaccttctgaagcctgggaggtgtgaacccagggcccgccaaccgctgcctttctcgggagtacttagagcctcgaacccgcgtccctgggggctgggccccaggcgcacggggctggaggcaggccttcgtgccttcgtgccttcgtgccttcccgcggtggccaggcctctgctgcagccgctggttgcaggcagagttttggggacctggcccttctcccactgggctcccccatcctgggccaaggccagaactttagtgctaggggaagatgaaatgtgcagttttgaaatgttgggtttccagagagagtcatgctggaggagaaggaagtaggccagaagtccagggctgcactgtggtgtgagggtggctttgtctaagatgcctgctcagcatgatcaccagagggtgtgggcaggtccctggagccgggggggggggggggggggggggggggcaggaccgggccgctgggccctcatgtgggagagaggtgaaaagcgtcccccactagggggctggcagtgcatgtgcttgagttaaatgtgcagggcagacagagccagaagggcctgtacccaggggctcgtcccctcctccggtttcccagacaaatccagacaccagcctttagggtggccttgggaggagagggccaggctgtcctgggtgtgagagaactagatagagcctcccaaccctgatttagaaatgcattccttattttgtctagaaattaataaatgaactagcttgttttgacaggtttatttcacatcctatgaatgtatgtaaataaactgtacataggtccatccacataaaatatcttttaataacatatcaacatttgtgtaaatttgaaatttaaaaaaatctatgaagctggtgtacatatgttacaattacgtatattttctttggtccttcataaaaatatatttactttgccaataaaaagaaaaagaactcacagcttttggcattcatgtgctgttttcctgctttgccgggatgtggaggtgactctggggccgagtctatgtctccaccttcgcagagttcagggaactctgttttgtatttggagggatagaaaggccccttggggtccagccccggtccagcagggtagggttcccatacagctcagctccaggccagctgctgagattctgctcatcccggctccctgacctggagctccgtaaacccaaatccagcccacattccgacagcacctgtgggaagctgcctcaggcctggccagtcctgcgaggctcacctactctgctatcggagaccctttcttgcacttcctacccccatccagtccaccaaacctattacacatgccctatatgtttgctgtgccttggcagagtatttacccccttaggaacgtggctgtgccatttcctactggcgtgggtaattgtgaaagtgttaggaatcctgagcaggcagaggtgagactcggagaggccagtatatgcagttacgtcctgtcctccatcgtccctaactccccaacatgcctggggtcttcgctgtgtggttgcacagttgaggttggacccatccacacgtcctgtgctggctggagcctgggggaagtgggggcccaagcacaaggaggggctatgagccccacagggaatggcaaggaaatggaggctgaccagggcctgcttcagtggctcagctggtatgaagcacacacacacagagagggctgccctggttcacccagtcatgtgcagtgggaagcaagaaccttctagaaggatcctttgctttataagaactggatgcaagtcgggtcaagtgtttctcggtgaaaaccttggagatctggaggctgggggtagggcacccatgggctcccagcagagagatgtctgaatgtgggggtctgtgtgaggtcgtgcatctcagagggcagaggccgttgttctcaccagccgcccagcacacagcacagctgataggaggatggacatcctatcctgactggccatggtcccgaggaggaggctgggcctagtgacctctgtcctttgcccctgaccggatgtaccctctgtgggcaaacacactctagggaagcaaggcattgatttccagccttgttaacatgggctttcttcatccataaacaagcagttcagccctagataagaggtacgtcagagggacagggaggattgttgtctggtcaggatgatgacatgggacgtggaataacctcgggagcatatgcaccttctgtgccaaggaccggccggacacgctgctcacctcccctgggtgtgtgtcccaacatcctgctgttgtcttgtggcagggagtgtgtgtaaggggtggtcttagtggtctcctcagtctgggcttccaggcttgcacctgaattgtgtgtacgtgcacacatatggtgcacctccccgggatgagtgtgcctcctggaggtcttggctgagtcgtggagagtacagcacagtgcagggaacagggataatggggccgcactgcctgttgatcctgggctccagctctttatgtgtgtcctagacctctctagatttcagctccttcgccctgcagagcagtgtgaaaggccccgggcaacagcgtggtggcacgtggtaagtgactctggatgcagagcccaggatgcagagcccagctgtgtggcacccccaggttcctgctgcagccccaatgtcagcattgccttggccctggtgggggttgagagtctgttacagtgcctggcctggctcctgcctcagagacccccatgccaccacctttctgaccgtctgtgatttctgtggctggaaggggagtgctgtgttgacctgcaagctgaaaaagcaggtggagatgggccctggactcaccacggtgaggaatagaggtggaagctggaaggctgcagagcaggaactccagccataatggtgccacccacccgcctgcccctaaggcacacagagaggaaggaagtaccatctactgatcactgtactaggtagagtatgagttaggctactataacaaagaaatccccaaactttgtggcttaaacaacatagcagtttattttcctctgcttagatggtctcagagggagcagcctgggctggcacagcagactgagtacagggcacccagcctccttcgctcttgttgctcctccaatgccccttggctccacaggactgggccagctgggagaagcaggcaaggggccatgtttctgccctgccctcctgggatttgcacactcacttccactcccattctgttggccggaactcagtaactcagcctcatccactgccagggaggctggaaaatgcagtcgtcatctgggcagcatgagcacagctggaatgtggggcacatgttgcaggagaaggcaaggaggtaggagcagagggcagccaggagtttccattgtaagcacattgttttgtcccagctgtgcccacagtgggtcccccttcccacgagctggcagcatggctaagtctggtggtgccaggtgagttcagctccccatggcctcgtccacattctcagaaagggcatcactgataagtgtgggatcagcagccagacttctggggcagcagattattaagaagggaaactctgtgggaacagaggagccaaaaggccctacgtaggagccaagatgccttggttgggaaaccaaggctgcaaatgacaatcttgactcctgcagacagcaaacccttgcaatgccatcactgtctgttcgtgaatagggtccagagtctatgtggggccgtgagagccgggaggtggagaggggacataggcagaaagcctcaggaccagggcttccaggaaaattgtcattttccttgtgttttattggttcaggctatccaaggcctggcaggggaacctgtgaggaatgaacatgtcaacctgcacagtgaaggcatgaggaggcgatctgaacccacaagagagggctgagagtgggggccatgtctgagtaggtcccacttcatttggtgatgaacagagatgaaaatggggcttgttcaaaagatgcagaatgaggcaaagagagcagcattcaaacactcctggaaagtgcacatctcgatgtgccctggggggccgggagggcacgagaaacgccctgctgttttcaataaggaagaaatagagagcccaggctgtagtgggagggcaccaggaccaggtaaaaagagagctggaagggatagcgggggattgcaagaaaacaaaagatgcagggcagagttaaaatccacatgggagaacgtcaggagtgggcatgaggacagggaactcccagcactgctgcagaagacaaatgatgacagctcgggctctggctcggctcccattctgtgaggtcctgctctgtgccccaaacagccgggcccgtcaggaagggacaccaaggaccccaaaggagcccctcctggaggtctggacctggagatgagtgaccagtcccccactgtcagcctcccttggccctgctgctccaccctgctctccaagccatcctggcgcacggacatatccacacccagcactgatagagatcgcagccggtccccaggctgttctcagaacccagccgggacgttccctgctgtttccatcctctgggttctgtgaatttggcctcaaccctgagctgagctgacactgaaagacagcaagagcagtgtctgtagcaggcggctccatcacgagagtgaggcgcaaggctacgacagagccagctgagggaggccagggaagggagtgcgcagcaggtgctgggagctggaaatacctgatgagaagagtgaaaatacatttctgcagaaatacgtctaaatcattgcaaatgtgtttaaaacctaagtgcaaatgtcaaatattgatagagaaagagaagaaatttgcgatgtgaaagtaataagacattactagtctggctgtaaatcccccatgatatgaacagacagggaaattgtgtgaaggattgaagtgtggctctcagggtctcctccttcccacagaagtctttgcattacgcatgaaatgaagaaaagacattgatgtcatttctgtagggttaattggtgagttgttgaacagctatccccagagggctctgtttaaatgcacgaacgtcaccttgacagaggaaagaaggacacctgtctgtttccacagcaaagtggcagtgctcttctctccctgaatccctggacaaggcgtggacggtcatgctgacgtggcactgctgggaggacagctggaccactgcccatcagaggacaccctggtgccacacaggagtcctggttcccaccttgggctggttggcaaagcccctccctgtcctctcccagccttcccaagctggtggccttactacaaatctgggctcacagctgggattccatccacatcctggcagaggatgccctgcacaaagctaccaaggtgcagtgggttcagtcttccggatgcccgagtctctttgccaatctctcacgctggcaaaatgctttccagatggtcatgaggagccacagcggctggagtgcactacactgggcatcctatttaaactgtacaccaacaccgccttctctacaaggcacccagggacttgctttttgcaccttctcccgccttgaaagcaccttcatcttcctcctggaacttcaaattccccatctgtttaaacaaacagaagaatttagagccagactccccataagggatgataataatagtaccttcctcatagggtcattgtgtggactaaatgagttaaaatatgcaacacacttagaatagcatctggcagagagcaacagctgtagttgttggtggcaattgtattattatccattgttacttgagtatatccttaatatccacccttcaccccaggaaacttaataagacatttcttctcaacgaatacagcactcttcccactagactttttttttaattatactttaagttttagggtacatgtgcacattgtgcaggttagttacatatgtatacatgtgccatgctggtgcgctgcacccactaactcatcatctagcattaggtatatctcccaatgctatccctcccccctccccccaccccacaacagtccccagagtgtgatattccccttcctgtgtccatgtgatctcattgttcaattcccacctatgagtgagaatatgcggtgtttggttttttgttcttgcgatagtttactgagaatgatgatttccaatttcatccatgtccctgcaaaggacacgaactcatcattttttatggctgcatagtattccatggtgtatatgtgccacattttcttaatccagtctatcattgttggacatttgggttggttccaagtctttgctattgtgaatagtgccacaataaacatacgtgtgcatgtgtctttatagcagcatgatttatactcatttgggtatatacccagtaatgggatggctgggtcaaatggtatttctagttctagatccctgaggaatcgccacactgacttccacaatggttgaactagtttacagtcccaccaacagtgtaaaagtgttcctatttctccacatcctctccagcacctgttgtttcttgactttttaatgattgccattctaactggtgtgagatggtatctcatagtggttttgatttgcatttctctgatggccagtgatgatgagcattttttcatgtgttttttggctgcataaatgtcttcttttgagaagtgtctgttcatgtccttcgcccactttttgatggggttgtttgtttttttcttgtaaatttgtttgagttcattgtagattctggatattagccctttgtcagatgagtaggttgcgaaaattttctcccattttgtaggttgcctgttcactctgatggtagtttcttttgctgtgcagaagctctttagtttaattagatcccatttgtcaattttggcttttgttgccattgctttttgtgttttggacatgaagtccttgcccatgcctatgttctgaatggtaatgcctaggttttcttctagggtttttatggttttaggtctaacgtttaaatctttaatccatcttgaattgatttttgtataaggtgtaaggaagggatccagtttcagctttctacatatggctagccagttttcccagcaccatttattaaatagggaatcctttccccattgcttgtttttctcaggtttgtcaaagatcagatagttgtagatatgcagtgttatttctgagggctctgttctgttccattgatctatatctctgttttggtaccagtaccatgctgttttggttactgtagccttgtagtatagtttgaagtcaggtagtgtgatgcctccagctttgttcttttggcttaggattgacttggcgatgcgggctcttttttggttccatatgaactttaaagtagttttttccaattctgtgaagaaagtcattggtagcttgatggggatggcattgaatctgtaaattaccttgggcagtatggccattttcacgatattgattcttcctgcccatgagcatggaatgttctttcatttgtttgtatcctcttttatttccttgagcagtggtttgtagttctccttgaagaggtccttcacatcccttgtaagttggattcctaggtattttattctctttgaagcaattgtgaatgggagttcactcatgatttggctctctgtttgtctgttgttggtgtataagaatgcttgtgatttttgtacattgattttgtatcctgagactttgctgaagttgcttatcagcttaaggagattttgggctgagacgatggggttttctagatatacaatcatgtcatctgcaaacagggacaatttgacttcctcttttcctaattgaataccctttatttccttctcctgcctcattgccctggccagaacttccaacactatgttgaataggagtggtgagagagggcatccctgtcttgtgccagttttcaatgggaatgcttccagtttttgcccattcagtatgatattggctgtgggtttgtcatagatagctcttattattttgaaatacatcccatcaatacctaatttattgagagtttttagcatgaagggttgttgaattttgtcaaaggctttttctgcatctattgagataatcatgtggtttttgtctttggctctgtttatatgctggattacatttattgatttgcatatgttgaaccagccttgcatcccagggatgaagcccacttgatcatggtggataagctttttgatgtgctgctggattcgttttgccagtattttattgaggatttttgcatcaatgttcatcaaggatattggtctaaaattctcttttttggttgtgtctctgcccggctttggtatcagaatgatgctggcctcataaaatgagttagggaggattccctctttttctattgattggaatagtttcagaaggaatggtaccagttcctccttgtacctctggtataattcagctgtgaatccatctggtcctggactctttttggttggtaaactattgattattgccacaatttcagctcctgttattggtctattcagagattcaacttcttcctggtttagtcttgggagagtgtatgtgtcgaggaatgtatccatttcttctagattttctagtttatttgcgtagaggtgtttgtagtattctctgatggtagtttgtatttctgtgggatcggtggtgatatcccctttatcattttttattgtgtctatttgattcttctctctttttttctttattagtcttgctagtggtctatcaattttgttgatcctttcaaaaaaccagctcctggattcattgattttttgaagggttttttgtgtctctatttccttcagttctgctctgattttagttatttcttgccttctgctagcttttgaatgtgtttgctcttgcttttctagttcttttaattgtgatgttagggtgtcaattttggatgtttcctgctttctcttgtgggcatttagtgctataaatttccctctacacactgctttgaatgcatcccagagattctggtatgttgtgtctttgttctcgttggtttcaaagaacatctttatttctgccttcatttcgttatgtacccagtagtcattcaggagcaggttgttcagtttccatgtagttgagcggctttgagtgagattcttaatcctgagttctagtttgatcgcactgtggtctgagagatagtttgttataatttctgttcttttacatttgctgaggagagctttgcttccaactatgtggtcaattttggaataggtgtggtgtggtgctgaaaaaaatgtatattgtgttgatttggggtggagagttctgtagatgtctattaggtccacttggtgcagagctgagttcaattcctgggtatccctgttgactttctgtctcgttgatctgtccaatgttgacagtggggtgttaaagtctcccattattaatgtgtgggagtctaagtctctttgtaggtcactcaggacttgctttatgaatctgggtgctcctgtattgggtgcatatatatttaggatagttagctcttcttgttgaattgatccctttaccattatgtaatggccttctttgtctcttttgatctttgttggtttaaagtctgttttatcagagactaggattgcaacccctgccgttttttgttttccatttgcttggtagatcttcctccatccttttattttgagcctatgtgtgtctctgcacgtgagatgggtttccttaatacagcacactgatgggtcttgactctttatccagtttgccagtctgtgtcttttaattggagaatttagtccatttacatttaaagttaatattgttatgtgtgaatttgatcctgtcattatgatgttagctggttattttgctcgttagttgatgcagtttcttcctagtctcgatggtctttacattttggcatgattttgcagcggctggtactggttgttcctttccatgtttagtgcttccttcaggagctcttttagggcaggcctagtggtgacaaaatctctcagcatttgcttgtctgtgaagtattttatttctccttcacttatgaagcttagtttggctggatatgaaattctgggttgaaaattcttttctttaagaatgttgaatattggcccccactctcttctggcttgtagggtttctgccgagagatctgctgttagtctgatgggcttccctttgagggtaacccgacctttctctctggctgcccttaacattttttccttcatttcaactttggtgaatctgacaattatgtgtcttggagttgctcttcttgaggagtatctttgtggcgttctctgtatttcctgaatctgaacgttggcctgccttgctagattggggaagttctcttggataatatcctgcagagtgttttccaacttggttccattctccccatcactttcaggtacaccaatcagatgtagatttggtcttttcacatagtcccatatttcttggaggctttgctcatttctttttattcttttttctctaaacttcccttcttgcttcatttcattcatttcatcttccattgctgataccctttcttccagttgatcgcatcggctcctgaggcttctgcattcttcacgtagttctcgagccttggttttcagctccatcagctcctttaagcacttctctgtattggttattctagttatacattcttctaaatttttttcaaagttttcaacttctttgcctttggtttgaatgtcctcctgtagctcagagtaatttgatcgtctgaagccttcttctctcagctcgtcaaagtcattctccatccagctttgttccgttgctggtgaggaactgcgttcctttggaggaggagaggcactctacgttttagagtttccagtttttctgttctgttttttccccatctttgtggttttatctacttttggtctttgatgatggtgatgtacagatgggttttcggtgtggatgtcctttctgtttgttagttttccttctaacagacaggaccctcagctgcaggtctgttggaataccctgcagtgtgaggtgtcagtgtgcccctgctggggggtgcctcccagttaggctgctcgggggtcaggggtccgggacccacttgagaaggcagtctgctggttctcagatctccagctgagtgctgggagaaccactgctctcttcaaagctgtcagacagggacacttaagtctgcagaggttactgctgtctttttgtttgtctgtgccctgcccccagcggtggcgcctacagagacaggcaggcctccttgagctgtggtgggctccacccagttcgagcttcctggctgctttgtttacctaagcaagcctgggcaatggcgggcgcccctcccccagcctcgctggcgccttgcagtttgatctcagactgctgtgctagcagtcagtgagattccgtgggcgtaggaccctccgagccaggtgtgggatataatctcatggttcacccgattttccaggtgcatccgtcacccctttctttgactcggaaagggaactccctgaccccttgcgcttcccaagtgaggcaatgcctcgccctgcttcggcttgcacacagtgcatgcacccactggcctgcgcccactgtctggcactccctagtgagataaacccggtacctcagatggaaatgcagaaatcacccgtcttctgcgtcgctcacgctgggagctgtagaccggagctgttcctattcggccatcttggctcctcccccccactagacattttattaaatcaaatgctttctagcatctgtgccttaacatattacttgcaagtaggtttttggagggtgaacacattcccttacaaaagggttgcagggctcagttgaagttgcatcttctcagggttcattcacaggtcattaaatactcaaccgtgggaagaactgaaagctgatgtgttcaagacacttctaattgcatatcaagcaataaaccagataaacccaatctgaaattgtagtggttttacaaggctgtgcacatttcctgggtttggtttgtattcccagagaggaagctaatcactggagtgctctgttcaataccagatgcctgcgacttatacctaggtctctgtcctcttatgccatcactcctaagacctccacagaagggcaggccctgcatccagaagaggggctcatgatgggggctggtgactctctagtttgtgaccagggagttgagtgtgaggggcatcttatgtgcctgatgttttccttccccactaccctgcctctgtgctgccctcagactcctgaggataggggcagattgcatcctcaagccccattcatgtcagttcacttccagcttctgctgcctgggtacccatgaggctcccccatcctctgctgcccttatgagagggattctggacaaatttgtcatatccagagagatgttctcattctttcagagacactggagacatagacattctcaggcttctggagacactggttattcacatgacaaaagagaaaagatagagcttttcctaacatcgtcacatcatgcacagaaaattcactccaggtaggttaaagaagcaaccataaacacacaatgctaaaagtacaagaaataatgagacacagggaagagcactgtattcatcaagaagaaatgtcttgttaagtctctcaaggcaaagggtgaataggacacacttatattcacaaatagcagcatgcacccagaagacccacaaaaacaaacacaacttattatttgcaaagtccttgccaatgtaatatgacaagaaaaaaaaaagactgaaaggataggaaaggaagggacaagatgacttttatcgcatatgatgtaattatctgtccggaagggccgaaaatgatcaattgaaaatctgccagaattaataaaactgttcaatcaatggccagacacaagataaacccacagaaatacatggactgattgcatgtcaatgtttcagtcagcaattactgtgtaattgacagcccacctcaaagctcagtgctctgaaacagtcctgatttagtactagagctatgatcctgtgggttggctgggagtctgctgacctgagttaatcttgctcctgtgtctgtggggaacgagggattctgctgtgactcaggctgggctggctggggctctgctccatgttgctcacatttcgccttgggccagcaggccagctggggtatagcccatggctgcaagatagcaaggcccaccttgcaagctcatttcagacctcggcttgcatcctgtctgctctgacccactgggcagaacaagtcatacggccaagcccagtgagaacatacagcagagggtgtggatgaatgaggggccatcactgagggcactaacacaatcaaaatcaactaaaaactgcaacagtaagtagagttcataacttttatgacaggaagaaaaatcacaagcaacatggcaggaaattggtaaaaaaaaaaaaaaagtgtaataatatgctgaaactttaatggaaaacataaagaagacctaactggaattgcttaccttttttttttttttttctgtatggggagactcagtattgtaaagatcccaatttctgtcatattgatctataattcattgcaattccagtacaaatccaaagaggattttaaaaaatgggacttgattccaaaatttatctggaggagaaaatgtataagatgcaacccaatatgacacgacaatggtggtagaggtggggagattgcctgacaaattactgaaacatcctatagaggtttaaattgtttggttttgttttattatttaatttattttattaattctatttgagacaggttcttgctctgctgcccaggctggagtgcagagatgggatcatagctcactgcagcttcaaactcccaggctcaagcgatttgccacacctcagcttcctgagtagctgggactccaggcacacaccaccacacccagctgaggttaaacatttttttaatgtggtgttataacagataaaggcaaagaagacatgaggcaacatacagattctagaaaataactcaagtacatatggctatttaatataagttatcaatacaaggttacttatatgataagagaggaaagatggaggttcttctcacaccatacacagaaaatccactccaagtgggtaaaagagccaaccacaaacacacaattataaaggtacaagaaatagcaagatgcaggtgccattatggaaaagatagacatgcttgacactaccatttaaactcctgtttaagaacagacaccctatgagtgaagttagaagataaatatgagacatggatagaaatatatgagtcaacaatccgaatatatctggaatgcacaaaactgttctacaaattagtgagtaaaacataaaaatcccaatagaaaaatgggcaatagatataaactagcaacttacagtaaaagacatgcaaatggcaagtaggcacatgagaagatatctaactttgtaaatatgcagaaaaatgaaataaaaaaacaatatatcctgtggaggttgactacattgcaaaaatgtaaaagattatatccaagcatgggggaaagagttactctcattactgttgattgtagtacaatttttttttggaggataatttggcaaacttcatcaaaacttaatcattcttttggccataataaaaaaatcaaaaaacagtagatgttggcttggatgtggtgaacagggaacacttctacgctgctggtgggaatgtaaactagtacagccactatggaaatcagtgtggagattccttaaagaactaaaagtggaacaaccatttgatccagcaatgccactactaggtatctacccagaggaaaagaagtcattatttgaaaaagatactggcccacgcatgtttatagcagcacaattcacaattgcaaattgtagaaccaacccaaaagcccatcagtcaacgagtggataaagaaactgtggtatatatatatatgatggaatactactcagccataaaaaggaatgaattaacagcatttgcagtgacctaaatgagattggagactattattctaagtgaagtaactcaggaatggaaaaccaaacatcatatgttctcactgatatgtgagagctaagctatgaggatacaaaggcataagaatgatacaatggactttggggacttggggggaagagtaagaggggggcaaggtataaaagattacagatatggtgcagggtatactggtcgggtgatgggtgcaccaaaatctcacaaatcaccactaaagaacttacacatgcaaccaaataccacctgtaccccaataacttatggaaaaagactgcaatctttctttgacctagcaaacccatcatattaaaaatccacatataaaagtatatatacaagtctgttcttttagcattatgacagcaaacatttgtgaacaatctaaacattttccaatgaagaatcgagtagataaattatggtaaccagaaactagctctttcatttggcaatgaaatggtcaaactcgcataaaatttacattatgtaaacatgacatgcaggcttcagtttctggaatcatcctatgtatgaagtctggaatgcaggtgtcagcatccttgacaacaatgcccccagcagcacaggagatggggaggctgggggaagactgcagacctcaacagcaaggcgggtcaaaatcctaagtgtcttctgctttgtcctgaaaatacacctggagtttgaccctgctcctcacccactgtggcccacagcacccatgatctcttgcctagactactgcagaatcatccacagacatcccaacctggcctcaccccttccagctccctgagggacagcagccagaagggcccagttaaagtcggtctgatcatgtcctgcctctgttcaggagcttcctgggggctccctgtttgcctcggaggaaaagtgaaaacctctatgaggtcccacaggagtctgccccacgcttcccacccagacctcactgcctgctatacttctcacttagctccagccccactccatcccagaagtgtcaagggcacaaaagacaaagaaagactaaggagctgttgcagagtggaggagaccatgagatgtgaccacagaatgcagtgaagaatcctgaacgatgtcctaggaccggcaaggcacctctgtggaaaaactggagaaagcccgttcaagcctggagttgagccagcagtcctgcacccatcttcatttcctagttttgatgaatgtaccctggctatgtgatgtgtcggggaggctagggaggggtattcaagaatgtttgcactatccgcaatgcttgtaaatctaaaatttgaaaattaaaaatttatttattaattatagttaaatcaactataagttattcaatcaatattaatcgacttaattaaaattattaaaataatttaaaattaaactctagttaataattaattgatttaaactaataacttaaaatttttgaggtaaatacaacaacagttaaaaacaaacaaaagccacctctgccagcactcctcagctctctccccagctttgcttctctccctagcccttcctgcctcctaggcacagcctaaagcacagattcgttcagggtgtgcgatctgtctttctgcactccaacgtgctccatgagggcaggttctgcctgttttataaacagtgctgtaaacccagcagctacaacctgtatcatcatattcatctataaattctagtttctgggcaccacaatttattttcccaattctccttcaatatatttttgttctcaaacatttgctgttataaattatgccataaagaacaggcttatactgcccaaggtaatttacagattcaatgccatccccatcaagctaccaatgactttcttcacagaattggaaaaaactactttaaagttcatatggaaccaaaaaagagcccgcattgccaagtcaatcctaagccaaaagaacaaagctggaggcatcacactacctgacttcaaactatactacaaggctacagtaaccaaaacagcatggtactggtaccaaaacagagatatagatcaatggaacagaacagagccctcagaaataatgccgcatatctacaactatctgatctttgacaaacctgagaaaaacaagcaatggggaaaggattccctatttaataaatggtgctgggaaaactggctagccatatgtagaaagctgaaactggatcccttccttacaccttatacaaaaatcaattcaagatggattaaagatttaaacgttaaacctaaaaccataaaaaccctggaagaaaacctaggcattaccattcaggacataggcgtgggcaaggacttcatgtccaaaacaccaaaagcaatggcaacaaaagacaaaattgacaaatgggatctaattaaactaaagagcttctgcacagcaaaagaaactaccatcagagtgaacaggcaacctacaaaatgggagaaaattttcgcaacctactcatctgacaaagggctaatatccagaatctacaatgaactcaaacaaatttacaagaaaaaaacaaacaaccccatcaaaaagtgggcgaaggacatgaacagacacttctcaaaagaagacatttatgcagccaaaaaacacatgaagaaatgctcatcatcactggccatcagagaaatgcaaatcaaaaccactatgagatatcatctcacaccagttagaatggcaatcattaaaaagtcaggaaacaacaggtgctggagaggatgcggagaaataggaacacttttacactgttggtgggactgtaaactagttcaaccattgtggaagtcagtgtggcgattcctcagggatctagaactagaaataccatttgacccagccatcccattactgggtatatacccaaatgagtataaatcatgctgctataaagacacatgcacacgtatgtttattgtggcactattcacaatagcaaagacttggaaccaacccaaatgtccaacaatgatagactggattaagaaaatgtggcacatatacaccatggaatactatgcagccataaaaaatgatgagttcatatcctttgtagggacatggatgaaattgga

SEQ ID NO: 1046 - DNA, 14776 bp, Homo sapiens
  source 1..14776: mol_type = genomic DNA
tgggagtgagcgcccagtgagctgcgggcgggctagtgctccgccgcagcgacccgcgggccggcgggcgagcgagccaccgcaggacccgcggctcggcccccggccgcggtcggacggagagccgagccgccgcccccagcccagcccgcccggccgcaggaccgccggggcctggccgccggtcgggcgtgcgccaagttcaggtgggagaggcgcggcggggccggccggccgcgtggacgcggccccgggtggtctgagggctggccggcctcggggcgcgtggccgtgcgcccgcgcagctctcggaggcactgcgcgagtgccggaggaatgtcggaggagcgggtgggcccccgcggaggtgggcaggggtcggactagcctgagggaggtgacccccccccagccccggtcgcccaccagcactttgctgaggcccgcgccgccgcctcggtgcctggccgggcgattccatggcgcgccttgcgggccggccctcccatatggtgggcaccggcgcggcctggtgagaggaggggacgagcggacgcgctggccagcccacggttgggggcggaggggctggagaccgaggggttactgtaggtcaccgcagcagtgtcgggggcaaggaggggcgcgggacgaaggcatggtgcccagcgggcagcggtccaggattctagaaggggtctgagccggctctcttcatttcccacgcacgttttcccgcacccgccggcacccacggcggctccacgcgcgagcacttcgcggacagcctcccgtacagccacagcggctaccgcgcaccacgccccgcacacgcagtcacacgacaggaactcacaccccttcacgcacacccgcaccgttcacgcgtctcactccacgctgagtgcgggtcccctcagaccgaacattgccaaagccatggcctggctgagggatggcggcggcggggcggagaggcagtccccgtcccatatggtggtccggttcactcttccctccccgccttggtgttactcatggaaccccctctcacggagggcacagaggggctgttttctcccacggccctcggaggtgacaaaatcaccaaatatctgagcgcctcaaatctccttccccctcccccccaggaccaggtggcccctggggagaccctgccgccctacaggtgtgaggacgcccggactctgcgactttggggcctgcgggcagctcagggaccgggactcttattttgaaggacggcccccttcgccacccccgtgatttgcacgctgacccaatggcaagcccttggccggctctgggcttgttatcaattacatgttgttcctgcagccgctgtgtccccggaaggataaacagcaggcctggccgggccaggggagggggcggagtccggcggccagccggggactgtgcccggaacagcgtgtcccctccccctgcacgcagcctgcgcctctggccgccccacgtgctgctgtgttttaggggccgagccagctccagccctacagtgtcctctctttaatgctggtgccctgggccatcccagagccctttctgggttctccgtgcctgggtgcctcccccttgagacgttcagcccagcgttaagactctgttgcctgacctgggccacccactcctagtctccgccccctcttcccccgcaccttccattcactcattcagcaaattttgctgggccctgttttagactctgggatacagcattggagtgaacagtcaggacagctgatattctgatgggaaggtagacagcaaagttcacaaacacattaccaagatagtttcccacagtggaacctgcagtgaagagcataatatagggtgatgtaacagggtgggcctggaggcccccacaggggtgacttctgagccgagatctaactaagcagctcccacctgcagtgctgggggaagagccagggcagtggcccccggctgaggctgaagtgaggcgagcatacctggactaggagagaggcagttggtggtgaggtctgcagagagtcccgagggcccaggtgctgggctgctgcgaggagatagggccacctgtccttgggaagccattggaggatgtttccttccaacccccgtactgtactttttagatcactttatctgtcaatatctgtttatatctttaaaaggtaaggcctcctttaaccacaatacgatcatcacagttaaaaatattaacagtaattacttaatatcatgggatggccaggtagtgatcacgtttcaggggagggctctaaggcctgctctgggtcccaggagggctggaggcccctgattccttaacattgcagtagaagggcagaggccgcacgtttgctgtgcctgcaggctgacaccaatggctggcactggctgagtgctgccggtgtgccagatcgtgaggggagttctcacaacacctgaggaaccaggcactgttggaagcacctccatctcacagactgagacagacacagaaagcctgtgcacctgcccgaggtcacctggcagacaagttgcagactcaggaatggagcccatgcttggagggtgggaaagggttggcggaggcccagggtggagtgtgggctctgctcagccttgtgcccttcacagtgtctggcactttcattccttcccagcacctgatttggtgaataggtgcattttaaaacacactccaggtttaaatccttagctgagtgtttaaaccaaaaagccaaatgtcttcctagtaaaactggcctgggatacagaccttgccttagtttcctggagttccatgaagcttcctggataagttgggaactgaggtcaaaggtcctggggtccctgagcaggaagagacttagagatctttgaagcatggaacagatgaggaaactgaggtttgggaggggaagcaaggacttgctcaaggtcatagctgatgatggtattggccattgggcagtgtggagtgccaggtcctgaaggggtcctggagacagaggggctgggtgtagaggtgatgctgggcagcagagaacctcctactttggtgcagagcgttccccttccccaagcttgataaacacccagcccgccctggtcactgagcagggacaaaggttcacagaggtggccctgtcacagctggacactgttgactctccttggacaccagacctagcatgttctttggcttcagaggatgcagctttcccttctctctgtcaaggttctctgagcccctcctgggcaccaggggccagtccaggcattggggacgcagcagagacatggagtgcactgtctcagggggagacaggcattagctgagcttcccaaggtggtgagtgtcccagatggagagagcagtggcagacagtgcaggggactccacttccttattggccaggatgggctggggggcggtggttatctcctttcccactagatgggtgtgaagtccaaggcagttatgcacatgcaggtgctctgggaccccagtggttggcttccacgccatggattaccaccagaggggcagggccttggccaccaggatgctaaagcgtcagggtgcaggtgagagggttgtgttcaagcctgtgccactcacagggcagtcaaggctcagcggggtttgaggactggagagtggaggaggttttcccctttagatggggaaacagccgtgcgggcaggcacttcttggtctttgactgttttgcctgcgtgctacacttgcccaggtaaaatgcaggcggcctagttaaatttgaatctcaggtgaaataatttttaaatataagtgtgtcctatccaatattgggaacatacttaaaagtagtttattttttaaatctgaaattcgaatttaactgtcggcttgtatttttatttgcgtaatctggcaaccctctggaagcctcagcaacatgagggtcagagggcaaatggctgttctacccccattctgtgactcaactggcgtgatgctgaggtcaggagtcctcagatgtccagtgactcctatgatgttgacggtaggctgattcggggttttggccctcctggggtccagagagcctcctcgcacatgcccttctctcatactcacccgtactcagttgttcacagacacatgtgctattttccaggataattctggaaaatctgtttgaaaccagaagtgcccctggttgtgcaatgggcttggagaggtctcttttgcaaacaggtggtgcaatttcagaaaacactcttgcaggcacagctctcctgggggatggaagcaggatccaggcatttggcaatgggaggctgtgggcaggcagctgagggtggggtcagaggcccgagaggtggcaggtgagcactgtccttctgaccaggcctcctgtgttccttccctgcagctgccaccggcacggccaggccagcatggtggaccacttacttccagtggacgagaacttctcgtcgccaaaatgcccagttgggtatctgggtgataggctggttggccggcgggcatatcacatgctgccctcacccgtctctgaagatgacagcgatgcctccagcccctgctcctgttccagtcccgactctcaagccctctgctcctgctatggtggaggcccgggcaccgagagccaggacagcatcttggactttctactgtcccaggccacgctgggcagtggcgggggcagcggcagtagcattggggccagcagtggccccatggcctgggggccctggcgaaggggagcgacccctgtgaagggggagcatttctgcttccccgagtttcctttgggtgaccctgatgacgtcccacggcccttccagcctaccctggaggagattgaagagtttctggaggagaacatggagccgggagtcaaggaggcccccgagggcaacagcaaggacttggatgcctgcagccagctctcagctgggccacacaggagccacctccatcctgggtccagcgggagagagcgctgttctcctccaccaggtggtgccagtgcaggaggtgtccagggcccaggtgggggccccacgcctgatggccccatcccagtgctgctgcagatccagcccgtgcctgtgaagcaggaatcaggcacggggcctgcctcccctgggcaagccccggagaatgtcaaggttgcccaactcctggtcaacatccaggggcagaccttcgcactcgtgccccaggtggtgccctcctccaacttgaacctgccctccaagtttgtgcgcattgcccctgtgcccatcgctgccaagcctgttggatcaggacccctggggcctggccctgccggtctcctcatgggccagaagttccccaagaacccagccgcagaactcatcaaaatgcacaaatgtactttccccggctgcagcaagatgtacaccaaaagcagccacctcaaggcccacctgcgccggcacacgggtgagaagcccttcgcctgcacctggccaggctgcggctggaggtcagtatagtgggtgacaggtctgggcggtgagcacagccactcatgtctgcttacttgggtgtgcagcagggcaattttccaccattaacagaaggcggatgaggaaggggagggaggggcaggcgagtgcaggcccagagctggcagttgcctggaggcttccttggtccttctggttctgaagccagaagccaactgggctccagtttcctgatggccaggtaaggctttgctggcctgtgctgcctgctgggtctccccatccagtctgacaagggtggggattgaggggctggagaggaaggatgagtgcggtctaggggccaggcagcggctccctttgggcccacagccccacagggtaagtaccaccatcccaacttacatcataggacaccagggctccgactggccaggtacttgcccaaggtcactctgctttgtgaatgggatttgaaccccggggtcggatttgagaggtcacatcctgaaaatgctgcttcctcaaccagtgggactagcttcattcaccgatgtctctagacatgtgggctaggcctagcccatgcttcctctctggggacatggaagcgtgtttgggaggctgcaaaggccaaccgagagggaggctaggccagctggcagtgctgtcacaggtggcagaacccaggctgtctgatctgcatggcagtggggaaatcaggcctcaaatgataactggcagtgtcccaaccatggttacccagcacccttccctgagcaccgggtgctgctcaacctccttgggaggggtgtccaccttttcctgaaatgtaggctgcttgccaagagcttatgtgctccgaggtgccagagccagccctctgcatttccagatgcccatcccaaaggaatctctgtcctgccttgggggcgctgtatgctgttggcacattccccatctttgctgctgtggctgctgctgtgtgtgtgagatggggcatgctcatctgtgtacctggggatgtatacaggcctgggcctcgtcagcgggtgtgtggctgtgtgtatgcatgtccacatgtgtatgcatcttgctttctttgtgtctgtgccatgtgaccatatgtgtttgcacacatacacgtcttaggtgtttgtgcaccatgtgtgcctgcctgtgtgtgtgtgttatgtgtgggtgcagcgcccagggagcagtttgcagcttttgttttcttgaccatactctggttctgagagcttttgagagttgtctggggcagaggtcctggccggtgaggctgagccgtggccggggagctgtgagtggaatgtatgttgtggcactggtgccgcctttccattgagtgccaatctggccagagaagggacttttcctgaacagtgtctaggtttatggagtcccctcctgagtgaggacctcactctgtcctgtctcccaccccattcagatagaccagagaggctactgtgagaacccaccctggggcctcacaaggtctccatcctggagtccccacctctctgagctttgtacctaggcctgccaagtgggtgcagggctgacaggctacttgtgagaggacacagtagcagttacactgtgtgggaggtcagaggagccgagagaagggccaggagcgctcttgattgaagcaggaaacttgtgcagggaaggcgagggcacgggagtgtgggggcagtggtcttgagcctacacctgggtcagccaccaacttgccatgtgcctttggggtggtcctcctccgaacctcagtttcctgtctgcagagtagagggctagccctttgcagcccatggcaggcatgcagggctccgcagcggccttcttcttgttggtacatcacaaggatacaaactcatacaaggcagtttctgaggaggaaccctgaaggtattctctccagcccccaagagggcggtgcctattgtggaggtgccccctactcccaggggccctgcatgcactctcctcttggtgggggcaggcaggggctgcagagaggaagggaagcctcccaccaagcaccagtctggactccctagtcgggctcagctttcagcgctgtctcctggccatagtcgaccattggcaagtggctcctctagtcgtggtgaggctgggtagggtggtggggagggcaggtgtggtcctcatccaagaccagccttcttcctggatatcttagagccagagagctgataggcccctcagcccagagtgtatctcagtgaggcagatcttagttctctatacagtggcctcaggaggtaatgaggtacatgagagagtggggacttgtggaggggattcagctctgacacatctgagccctggcactggttgtgctgcccaggacccacttggcaggagaaggcgtgatggttgcctggcccagtgagatcacagtggcactgcccccaggagctgtccctgctgccagccatgccctgggcttcctgagggctcctccagcttcccccagggtcccctggagtgggtctggccctcagggggtaactcatggcagaggcgctgttcagctgggagctgagggcaccagcctctagggacggctgcttttctgaggatgcagggagtcctcagttggctttcagggatcttgccttagtttcctggagctccatgaagcttgggatctgccctgtctgcttgtgtctcttaatatggtgatagtcttcaactgagagggagcccctgcagctccttgcagcagtcaggagggaggatggaccctgctttgggatagctgggtctggacaggactggaggagtaacgatgatgatggtgagatggcatatttactgaccactcactgtatgctgggcactagtcttaagtttctcagagctggaatcccttctgtccactattgtaacttgcatacttcctgccatggggagctcattaccttctgaggcctttaagtgtactttgctatgcttcagtttctattcaagcttctcattctggcccatagacccacacaatgtgcttgcctgtctcttccccttactgagtaggatccagccacgctggcctccccactgttgctcaggctcctgctctcacgtgggcatcagccctctctgtgccctctcgaatgacccctgcccttgaggctgtagtgacagcttaaggttttcgcattagctcatcaggtccttgtaactgtctggtaaagtgtaggccccaatcttcatttcacaaagagggaaactgaggcacagactgctcacatcacatgcccgcagggacatagctagtgagtgtgaatctgggttgcatgcctaagcccgagcagaaccctgctctggccgcccagcagtcccagctggtatcagagttgccgtgtgtgcctccactctcctaccaagaggtcggcccaaaaggcattatgcttctggctatgggaaaagagctaacaaccacaatcgagataataaccaaggcctctaatgcatacctggcactgctctgagcaaaattcacatatattaatttatgtaattctcgaaattagtaggcatcagcatgttgtccctgtttcacagaggagataattaaagcacagaagagttaggtaaattctccagtcagacagccagtaagccacagagccaggagttcaactgaggctgtctgcccagactcagagacctccctctgcacccctgtgttgggtgctaactctggtgttggggacctccacctccatctgcagcttagcctggtctttggggtggcagctctgcactttcacctactccccgtgtgggagctctccactcccaggactcgtctcttcttcctggtggccctgatgaatgggatgctcttcctgccccaggctggctctggcctcgtaccgtgtcctgtgcgcggagaacaagcgagggcccctcagcccccttgtccctctgtgtaatggacggtgccctccctccactgctgaggtcggcacctgcccaggtactcagcccacttccttctgcttttggtcctgaaagtattccctgtcccttctctggtgacatgattttggcaccctcaacagggctgagagcaggctttccctgttctgatccagccgtctgggaagtactgcttgcctgccttcctagaagtttccttgcctcactctcagacataggcatcctttgttccttgcagcagaacgtcctgttccagaatggccaagccattccatccagaaagaatcccttctgctgcagtgaatatgaatatgaataactgtcatcatcctgcagggtgggtacctttgtcatccacagtggatgtggggtggggggacagagaaggggagttgcaggctcctcttgagcgtcagagccaagaggtggtaggcacaggattcaaacctaggggtctggctcccagcctgctctcatgacagctgtgtgatgaggctttttctgacctccttccctctgtaggcagaggcccccggtatggttgggcaggttgtgaactgcacaactctagggagcaccattcccattgcagtttctgagactggaccatttgtggtggtgtctttctggcagatgagggttagtgtctcaaggaagggaagccttcacatagaagtgctgtatgcaccagccctgacattatagctgctctagagagacactggacccctgtttaccctctgccctacagctcagtgcaaatcatggtgctgccctgtctgcaacaggacctcaccagaagccaggcccaacactcaactccatgcaggtgataagagctcatgattcttgaataattgccacgtgctaagcagggctctaaactgttactggtagccttgtacaaacctcacagtcctcaggaataggtattttgttctctctgtgtccgggtagagaaactgaggctcagggagcttggtgactttcctaggttgcctggttggtaagtggcagagcttactgcctacaagggctgcatcttacccattgggttcccgtgtcccccactgtagtccccagggctctctgttggctgctgtttgggagaatgtggcatgcaggggtgaggcaggggtcttctgagggcttggttcccagggaaagtcctctcaggtgcaaggaccctgtggcagcaaggagggagttcaggtgaggacagcatgttgtccagcttggttctctcatctgcctgtccttcccagggtgtcaccatgaccagagagctgcgttgccccacgtcaccacctgtggtctctgagatgagtcttggaaggtgggcaggaatgccaaagtcttcactggatgagtgaagaaattgaggcccagaaaggaccattcagggcacccagtggggtgggaactgtcaaggcaggaacctgagactctgtcccctagactgtgtgacttggcctctttaaacccttgccatggtcttgccagtccaatggggctggctcatcctggctccctggccagtgagatgctgggtgaccccagggctgcagtctgggaggtgtggcactctgtgtctgcagccagctttctgcctgcccctgcccggggccagctcctctgctcagaagctgtgtgcccagctgcagctggggcaagtgttctgcccaggagcacaggtgtcaactttgactgccagggcacatttatcccatttcgtcactggcacagggccttgtgacacataccacccagccaggcctgtggaggaggctgggggactctgctgactgggagttcaggtcatctgccatcgctagggcagggggctgtgtcaagacctttgctccaacctcaagggctctgtcttgtcagtgaccctggatcaggccctcagcaccccgagcttcagtttcctcctctgacaggcagggcagttgggcttcacctagtctggagatgtgctgagagtgctgccctgtgcctggtgccaccaccactctgtgatgtgggttggagtgcctgtctcctcctgcaggccctcctgccaccccctgtgccttgtccagagcatgttctgctgggtccttctactcctccacccacagggtcagggcaccagggtatcaccagcccttaccaatcactggttgggaactgctgttcggggcatcgcctttcgctgggtggccctggtccacaaaggggtgttgggcctggtgtccctgtgtgtgtgtgtgcatgagtacatgggggcatgaatttgtgcctctgtgtgtgtgtgcgtgtgtgtgggcacatactcattcgtgtatgtttgtgtgcctgtatttgtccgtatgtgtgtgcacgcgtgcgcatgctttgggactgctccttgacagtgtctgcccccctggggctgcttgctgtgcccactcttgcattgaaatgcacctccttagcacctaccatataccaggcattgagctggtcatgggaagaccacagggaaccagacagacatatcctttgtcatggagctgacggtctagtgggacagactgacagtcatcaaaaagttaaagataatttaaaatcaaaacaacagcaagaatgaggagagagaggtgtgtaatgccacgggagcttagaattggatgtagtcctggagggatttcctgaggaagtgacattcgaactgagctctaaggaatgggtaggagagagcacagagggggaggaaagaacattctagaaagagggaatagtatgtgcaaatggcctgtggcaagaagaaccaaggaaaggtcaatgcaggtggagcacagagggggatagtgtgttgtgggaggggtaggtggggtgggagggtcctgctgccaagccaggggtggagagaacctcaaatccctgagatcggtggcaagcagtccaggccctcgatgcagcctgggctcttgactgtcacatgaatgcctgctcccaggccaccgggctaagaaagggaaatgtcgggagccacctgaactcccagatgcactttgcagggccaatctttatttggacctgccttagagggcccagcttccagcacagctggttccaggagtgggtgggctcaagtctgaggacccctctccctgtgctgcacaggaagtctgcttcctcctcccaggcctcagtatcccctccagatgggctgtcctgtacagaccttcacagatgcccctgtggagttctggtccagcggggtagatgaggccagggtggtgagaggcagccagcatcagggcctgagcgactgagtgcacctgtggtctcagagactcctgcacactgggttggctgtgggaggaaagccctgggccctgggagcattggggtcctttcctgttgggagcttttaccagctgctctggcagttcccaacagagaatgcccactgtgccagcatgagcctttactgtagttctttctatcttggaggggtagcaggggcggcttgggacagtggctcatgcctttaatcccagcactttgggaagttgaagtagccttatcgcatgagcccaggcgtttgagaccagcctgggcaatatagggaggcctggtgtctaaaaaaaaatacaaaaattatctgggtgtggtgggcacacccataatcctagctactctggaggctgaagaggattgattgaacccgggaggctgcagtgagccatgatcgcgccactgcactccagcctgggtgactgagcgagaccctatctcaaaaaaagaaaaaaaataattgatattttgagaactggtatagccttaccgatgcagatgggggaccctcttctaattctgtagaggctgcaggtctgtgcagccaccctttgggtgagtgccaggtgcgcgcctcgcatccccgcatcttcgtggggtcggggcaggcagggccaggcctcgctcaccgcgccatgtcccgcaggttctcgcgctctgacgagctgtcgcggcacaggcgctcacactcgggcgtgaagccgtaccagtgtcctgtgtgcgagaagaagttcgcgcggagcgaccacctctccaagcacatcaaggtgcaccgcttcccgcggagcagccgctccgtgcgctccgtgaactgaaagcgccccgaaccctcgcctgtccttcaccccagatccccaccccagccccatttttttaagcaataatttatttgcctcctccagagggacatgacaatgttaccagcccaccttctaaagcctgggaagtgtgaacccagggcccgccaaccgctgcctttctcgggagtacttagagcctcgaacccgcgcccctgggggctgggcccccggcgccccgggctggaggcaggccttcgtgccttcgtgccttcgtgccttcccgcggtggccaggcctctgctgcagccgctggttgcaggcagagttttggggacctggcccttctcccactgggctcccccgacctcggccaaggccagaactttagtgctcagtgaagatgaaatgtgcagttttgaaatgttgggttcccagagagagtcatgctgggggagaaggaagtaggccagaagtccaggactgcactgtggtgtgagggtggcttggctttgtctaagatgcctgctcagcatgatcaccagagggtgtgggcagggctctgggggtggggtgggtgtcaggaccgggctgctggggcctcatgtgggagagaggtgaaaagtgtcccccactgaggggctggcagtgcatgtgcttgagttaaatgtgcagggcagaaagagccagaagcgcctgtacccaggggctcatcccctcctccggtttcccagacaaatccagacaccagcctctagggtggccttgagaggagagggccaggctgtcctgggtgtgagagaactagatagagcctcccaaccctgatttagaaatgcattccttattttgtctagaaattaataaatggactagcttgttttgacaggtttatttcacatcctatgaatgtatgtaaataaactgtacataggtccatccacataaaatatcttttaataacatatcaacatttgtgtaaatttgaaatttaaaaaaatctatgaagctggtgtacatatgttacaattatgtatattttctttggtccttcataaaaatatatttactttgccaataaaaagaaaaagaactcacaa

SEQ ID NO: 1047 - DNA, 213 bp, Pan troglodytes
  misc_feature 69: note = n is a, c, g, or t
  source 1..213: mol_type = genomic DNA
attcttggatttatgaaagacgaacaactgcgaaagcatttgccaaggatgttttcattaatcaagaangaaagttgggggctcgaagacgatcagataccgtcctagtctcaaccataaacgatgccgaccagggatcagcggatgttgcttttaggactctgctggcaccttatgagaaatcaaagtttttgggttctggggggagtatgg

SEQ ID NO: 1048 - DNA, 31001 bp, Mus musculus
  source 1..31001: mol_type = genomic DNA
ggatgcaaattctagtcctgggctgggaacacatagaaatttctgctatgccacttacattctccgtaggagacaagagtttacagaataaaataaaaacttctaatacattagaaaatagtaagtctccagaactgttaaactggataggaaaatggggggtgggggatgcagcagggagcagggggcaaatgcaggctcccttgaagatgccacttgagtgaaggagggagccatgggaatgttgggaagggaatcatactcagacaaacagcatgtacaaaggtcctgagcttgcgcctggcaggttaacctgagaaagagaggtcatggaacaaagggacccaaaagagactgaggaaggctgagagaatggggttatatatacttcctgtgagtgagctgggagccctgggaaggttctgaagcaaggatgcctaatgtgactcaggtttaggcagaatgtcctaggttggccatggcttctagacagctggggcatcttccctgtggactgaggccgctcagctacactgttgctttcaagcttctgatctttgactgcacttctccctgggggtgggagacattggacagacagagtgtgaggaatgcagagcccagggtaggcagggctatggagaagtgtgctggcccagcctgaccctgccctcccttgacaagataggatcaatcaactttatggactagccaaccccacctgctctgcgtgctagccctggctagctattcactggctgtagaatactggggaagactcagactgggcctatgatcaatcagaacgttgatgaccatcttgtgctaagcacagactccttccgtgctctggctaagactcagtttaactgctggatcatgggcactcacctggagaatcctcagatccttatttaagggatctggctaaaaatcctggccccaacagggacggcttggagaagcaaggggaaaggctggccacctcgcagtgtcaggtaggaagcgccaggaaggaaggtctgtccaaatgtcctgggtattaagaagcaggggaaagacaagacagacctggctgtgcctggccctctatctgcttggctaagaaggcccacgctcgctctcagcgggttttttcacgccgcccgggtttgaagccaggcagtgtaggctaaagtgcacagcagggtacccagcactctctgctcacgtgttttcttgggcttcactttcctcattaaaccggtgcaaaagctgtctatgatggcttgggactgcaatctggaactccctctgcagatcagaagcaccctgcagtctttggggaggtgccgccactggtggtggtcagcaaacctccgcagtttgtcagtcgcagaagtctagggtagcgcagtgagcgtccattcccgtgagtaaccatgaccgctggaggaaagaccagatgtatttttacaattggtccctttagacacggtccctactagatcgggccttgttaggaatgcggagggggttgcagggacgattccgctcccgaggtcccacgtggtctgcacttcgggactctgcgggctttcagtggattctagaacccgtctcacgtgcgcatcggaggacccagtgcagatccacgaagagaccggagagcgcgtgggcagcgggagggtgcggccgaggcggggcgggggcgcgtgacgcgcggcgctagccaatggggcgcgcgcccgaggccgagcctcctgcgagccttcgcggcgcccgcggcgtcacgtgagcggccggagagcggggagagcggcgagcggcgagcgcccagctcggccgcagggagtgcgggctgcggccaggagcgctggacgcgcggccgcatacggagccgggccgcacgcgcgaggccgcgccaggcgacgcggagtccaggtgggagacgcgcgatgtaccgcggccgcgtgggtcctcccttggggatcacgggccgtcccctggcgcgcgctgtaggaaccacgcgcggaggcccgggaaatgaggggaccccggaaatgcggggacccccgtgagcgcgccgggcctgcaaagggcaaatccggtgtgcgcagcttctgcccgcggagcccacgcgcgtccgtggcactcctggacctgcgctcccatatggcggggcctggagaccaaggggcggagaggttactgtcggtcactgttgcggtggcctaagaggggacgcgaagggggtcactgggcggagggtaaggtactctccgaagctgtgcgccagagtccgagccacctccttcccacgtacttcacacccacgggtgggcacccacgcgcgggcacctggcggacacccgcacggctgcactgcgcccagcacacgcaatcacacgacacaaactcacacccatttgcgcgtacccgcagcgtgcgcttatgttccgtatccccacgcagagtcctcaggcccctctgaacaaacattaccggagggaccgctgagggtagcagccgcagggggcaggtcatccctcttggaaacattctcccctggagggcacaggggaggtttgctaccacggtatgggaaggtgaaatctcaaatgtttgactgagtccttcagatattgcccccgaccatggggagtccccgccgccctacaggtgcgagaatggcagtaactttggggccttcggactcctcagggagaagactcttattttgaagaccggcccccattcgccacccccgtgatttgcacgctgacccaatggctagcccttggccggctctcggcttgttatcaattacatgttgttcctacagccgctgtgtccccgggaggataaacagcaggcctggccggctaagagagggggcggagtccagcggcctgccggggaccgtgcccagaacagggtgccccctccccctgcacgcagcctgcgcctctggctacgccacgtgctgctgtttttctgggaccggcttgatcgctggcacttgggctttcaagtcctgggtccaggaagtcctggatcccctgggccttcagtacttcagtgtccccagggttgctcagcactgttttaagatcctgtgttataaccggttagggccactccactcctgcatttactcctggattctggaaacattcagcaaaggctaggtctggttttgactctagatctagccctgtagtgaacagtcaagactgcttgtattctggtggggcttgagcatacaagacagttttcacagtgatacctgaccgtgaagaatataatcctggtggcttgtccaaggtgggagtggcttctgagttgagatttaaataatgagctcccatctggaatgctaagagagccaggacttccacaaagggggccattggcgccaaagccagggctcagtagggtgatccaggcctggaacagttagaggggcagtttgggcgcgggcagggccctagtactctgagtcctggaagaatctgaaacattttggggggaggggctccttccgatgtaattctattttgtcaccctactttcttacctgttctccctctccctccttctgtgtttcagtgggatcccacgtggttgcctttgaatttatgattctctggcctcagcctcctgagtgccatgattataggcatgagtcactatgcccacccaaattgctgctcactttcatatcagacctccgtttctatcggttcaaaaatcgataccacaatctcctttgaaagcgtgtgaccgatcgactgatcgctcagtgttgtagtgtgtccgtctccagtcacatctcattgcaggagatcttaggtggtccttttctgggtcctgggacaccatgttccctgcatttgtgtgaccgttcagacattagtaagtgctcagtatacatgagttcactgagtgtgcagtgactaggagccagatggtaccagcagtacccagatgtgtacacagagaagttatgccatttgcctgaggttgcacagctgatagctgtagggtggatgagatggggttgggagaatggaatgggtgggctctgcccttctggcgcttcataccctcccagaccctgctttggtaaagagtgtattttagaacacattcccagttttaaatcctaaactgagtatttaaactcagattgcctcttggcaagattacctttggtctcagatcttgcctctgttctctacagcaagagagaaacttatggagcacagagacatagaacagttggggagactaaggcacacggtagcgggatgactggcttttcggcagctggtcagtaccgggtgctaggctgtagagtggacctgaagtcaggtggacaggatgcagcctgagcatcctccccatcagtttgataatcacacaggcagacatggtcactgggcgggacaaaagtccagagaggtggccccatcacagccagagactgttgactcttcttggataccagacctagtatggcctttggcttcagaggacacagctttcccttttccttccgatccccgctctctgagcccctcttggatacctggtgtggtgctgagtgttggggacccaggagagtgtgctgccaagaagggacacaggcatctgctgagccccccaagtcggtgagtgtcccagacaggagagctgggctggggaggcagaacaggaggctctgctctcatgcgttggccaagggcgaatgtcacccccatccttcccaacggctatagggttcaaggaggttacccacacctgggctctctgaccttctatggactcacagccaggggctggaccttgctcattatggcaggaaggtgttagatgttatggtggaaggaggtttttgctcaagtatgtgagacttttcccagtcatggagaacggtggctctcgactcttgataaaggtctgagaactagactgtggagaaacaccacataggcaggcaggcacttaaatggtctttaatctttttctaaagtatggctacctgattaaagcatgggcagcccagacagatgtgtgtcccatcccttccagtcctggggacaccatgctcacatccacagatgttcatttttgaacatctaaagtcaacatcgaacaagcagcctgtttttatttgcttaatctggaaaccctacagaagccccaataccttgagctcagaatgcaaatggccttttcctttctcaccccctctctgactcaaggtaggaagcagagtccaggggctggcgactttcagggcctcccctctctggctccctctctcctcgtggcctcagctgttcgcggacaagagcgttccttgtcttattcttttccaggatcattctggaaaatgtttgaaaccagaagtgccctggattgtgcaacgggcctggagagggagggctcttttgcaaatagggtgatgcaacttttgaaaacatactcgccggccccattctcccttgggatggaagcaggatctggacatttggccacaggaggccttgggcaggcagccgagggtgagggctgcaaggcactggtaagcagtccttctaacctggcctcccttgttccctctctgcagtcaccacaggctcggccaggccagcatggtggaccacctgcttccagtggacgagaccttctcgtcaccgaaatgctcagtgggttacctaggggacaggctggccagccggcagccataccacatgttgccctcgcccatctcggaggatgacagcgatgtctccagcccctgctcttgtgccagccctgactcgcaagccttctgttcctgctacagtgcgggtccaggccctgaggcccagggcagcatcttggatttcctcctgtcccgggccacactgggcagtggtggtggcagtggaggtattggagatagcagtggccctgtgacctggggatcatggaggagagcctctgtgcctgtgaaggaggaacatttctgcttccctgaatttctgtcaggggacactgatgacgtctccaggcccttccagcctaccctggaggagattgaagaattcctggaagagaacatggaggctgaggtcaaggaggccccagagaacggtagcagggacctggagacctgtagccagctctcagctgggtcacaccggagccaccttcatccagagtctgctgggagagagcgctgtaccccaccaccaggtggcacgagtgggggtggtgcccaaagtgcaggtgaggggccagcacatgatggccccgtgccggtgctactgcagatccagcctgttgctgtgaagcaggaggcaggtacagggccagcctccccagggcaggccccagagagcgtcaaggtcgcccagcttctagtcaacatccaggggcagacctttgcactcctgcctcaagtggtaccatcctccaacttgaacctgccctcaaagtttgtgcgaattgcgcctgtgcccattgccgccaaacctattggctcaggatccctagggcccggccctgctggcctccttgtgggccagaagtttcccaagaacccagcagcagaacttctcaaaatgcacaaatgcactttcccaggctgcagcaagatgtacaccaagagcagccacctcaaggcccacctgcgtcggcacacaggcgagaagccctttgcctgcacctggccaggctgcggctggaggtcagtatttttttggataggctgggcacaagcaagtaggttcatctctgctcccccgagtgtatgacaaggtccctttctccattagatgaggtggattaggaaaggagcaagggatgggcaggggacaggatcagagatgacagttgttgtcccacttggagactaaatctggaagccacctggtctctggtctctttaaagaccaggtaagttttgctgaggcttgagctgtgtggaatctctcaggctgggatggaaggaagatgaggggctaggctgaagtggaaggaaacgcaacaaaggggcagctgagtttggtggcacatgggcacaggccagaggctcatgcaggccttacagcacctccaggtaagtactaccatcacacccatgacagttttggtcaggtacatggaaactgactggctaagaaccacccaggccgtagcactcttgagtggactgtgagccccaagacttgaactagaaaatgacacttccctccagcccggggacaagaactgctcacgggtgtgggctcagctttgctttgtttcttcctggggacaaggaggtatgtttggaaagccatggaggacaactggaaggaaggatagatggctgggctatgagggggtcaaagatggcagaatacctcagacttatgttccaggcaaaagggtgcccagcacttcagggagaggagcctcagatggccagatgtggtgccagggaccatggaaccctgcagtcaccctggcctggcctctgaatgctgctcattatctttaggaggccggtggcctgcatatttagggtgatatggccttcatagctaggatgtgtgccagcagtgttagtgtatgtgtgtgcctgtctatctctgtctgatgtggttcatctgtgtctgctgaggactcatagagctagatcacttgaatggatgcctgctgtgtatgggcacacctgcttatgtattgtgtgatcatatgtgtcttgtacctggtgtgggtcataccaggtcacagaggtggtgttgtgagccaggctttggttctgagttggtggtgctggccccagggcaggtgctgccctgctgagactgaacatggagggatgacagtggcagaacttcccttccaactccaaattggtcagaaaaggaactttcccccagcagtgtcttgggttgtggaggcccttcctgggaggcatcactgtcttctcacaacttttcaaatgctgggctccctagacctgcggtctccacctctctgagccacctgttttagtgagtagatgcagtgtaggtctgtgggataataagtgggtgggttgtagagcaagaaaagcccagacagagaggcctgggggtaagggtgtttactgagcaagggaagagcagtagtccctgtttggagggggcaatgggacaggggccctggtttcctgtctggccctttttgtttcctggagccctgagctagtgtgggggtcctcactgtgccctcttttcatgaagtgaacttccactttcccacagtcaaactctgaagaagaaccccaaaggtgtcctgcctaggaactggcaggtgtgcacacgcacagggacttatgggcaagccactgaatagccttatccaacagtcctaactctgaggcttgcttgccctgaactctgaccagcgctgcctatttaagtggcatctccagagggcaaggggccaggccagagctgcgggctatgagatgttgtcaaggatgagggctgggagacaggtccttgccaccatattgctgctccaggaagcacaaggtgtccaaggacggccttagctctgaccctgagccttgcactagattcgttgttcaggcagaaccactcagcaagactagggacgtggtatgctgatcaaggtccctgtgcagcatcagcctcaggaaagggctggttgtgttattgtgtgagctccttaggatcttcttggatatcagagaagcctggggttgtgcttagaaggtttgcaattccctgtgcatggccagtcttccacccagaggctgtgggatgggcagagataccttactgcagtcaggagggaagatggacccacagagactctggatctggccaggatggaatgagatggcaatgaagatggttggtggtagtgacaggtcacacttacacatcacggtgtgttgggatgattccaagctttggagagtcccccaccaaccccttcgcttgtctgtgaccttctgcggtagcccattactccctgaaaccgatctgacctctaaaaggcagagaacaccttggagtgtttgaatcccagtctaaccttctgctctggctccccacactcccctacatgctccctggctttacccctttctcaagcaagatcatccatgcccctctcctctctgcctctcttcccaccccaaagggcccagggatgctatggtgtctcagcctttgctgtgcacccccaacgcaggcattagttcatcacgtcctcacaacagttctacagagggaaatcgaggtacagaacagtcatctgtcacagggatgtgcctaatgagtgtttggggggtggggtgcagccctgtgagtgctatagcccactgattctccagcagtccagccaggtatggaagtggccatagtgtagtgtatgctgtgctttttcagtgtgtgtgtgtgtgtgtgtgtgtgtgtgtgtgtgtgtgtgtgctcctttgttcaggtacacatgtacatgaaggccagagatgcttgtcttgtgtcttcctcagtagctctgcaccgtgctttttgagacagggtctctcactgaagctcaagggttggctaagctggttggccagtgagttctagctgcctctgccctaccagcactgcatattccgggtagaccctactatgtctagtgagtgccagggatctaaacttgggtccttcctcatgtatgcacagcaagccctttgccaaatgggccatgtcctcagcccctgggctgtgctttttttttttttttttctattgtgctcctgactgtgggaaaggagatagcagcagcaagaatggtggtaacagccctggcagggcatggtgtatattagttcctttaactcttaaaattagactatgacgtgggcccagaagaggaaacagcagttaagcacattctctgtggccatgctgcttaagagtggcagggttgccaggtggtggtggcacacgcctttaatcccagcactcagaggcagaggcaggaggatctctgagtttatggccagcctggtacagaatgagttccaagacatctagggctacacagagaaatcctgtctcagggcaggagaagtccagagtgaggagtttaacagctgtttgctccctcactcaggctagactccgtacttctccacactcctgcacacctccctggaagagcctctaaggaggagaggcccctcctccacctgcagctgggcctagttggcccagcatgttctgtgcttcccatctggctctgctgttgctggcgctgggccccggaattcctaaatttgcctgagcccctgccctgcccccgactcctcagcccaggggactgctccacagctgaggtggcacctgtcccagtccaaagcccactgccttctgcttttatgcacccaggattccctctctctctctcactgttgggtcataggtttgtgtgcaggaagaactgaagccagcctgcctgttctggtctaaccatctgggaagtggctgtttgccgccttcctagaagtttcctctctcgctcgctcgcagacataggcctcctttgttccctgcagtggaacatcctgttccagagtggccaagccgctccttccagaaagaatctcgctgggccatagctaaagtgaatattaatagctgtcagcagcctgtgtggcatgttctgccgatgtccgtggtggacacaggaggcccaaagggagacagtggactccaaagccactgttggaggagctggacacaggattcaaacttagcggtttggtttcaggccagcgtctttagccatcgtgactgttgcccataagaggggatgtgtcctctggccttgtggttagcagatgctccagataacatctgcaggttgtataccacacacacagccttagggcctgcagcttctgagatttggctgttgacagtggctttctgacagatgacaactggtgtcttcacacagctcccatgctggcattacttgttgcccctgtgcttgcttttgctctgtgacccaatatcagttgtcatgagcctgccccacatatgccaggcaccaggtctttgccgtgtatcaggcaggccctgtgctctaccccatgcctccagtaggagcttacagttcttaaatgaccacatctggagcctcacggccaccgtcctttgagataggtctgttgtcatttctgtctcaaggcagggaaactgaggtttaacaagctatcatctacccagaccaatcccaaggctgtgtcctgcctagccgagatttctcatatcttgctccagtgttgccttaggcttctcctctggctgtcatcaaaggatttgacccagtgaggcaggagtcatctttagtccagtcacaaggacagtcttgtcagataccaagaagttatggtggcagagagggtttctggaatgaggacagcttgttctctggcatggctacctctcagctgcctgtccctcctagggtgtcatataacaaaaggactgctacccattccctggaaggcaggcaggaaatgagggaggaaactcaggtcggggatgctcaggaccattggggtggggactgtgaaacctgttcttccttgagcgtaggtgtgtgtccaactcctgcttgaggcatgcgactatggcacagggtcctggtaacagcattaccaggccaggtgaggaggtcttgttctggcctcaggtgttctcagctcacacctctgcaccaggtcccctggtgcccaggacaaggttgtggggcagcagcttgcactgtagctctacctgctcagccagcagcacaggaaattgaggtccttggtgtcctgagccctgcctgctctcggtaccactgttctcatgtttcccaggctgaggtcagtgtggcctgctacagaatcaggctgagatggctatagcctttgacagcagagtgtgatgcatctgctgtccacctattctgcatcaccaagtggccctgtctagaagcggggtgccaggcctggagctcctgggtgttcctgggagtgtatgcagtgaacagtgtgtgacaaccctgtctcaacctgaggtgccagctgaggtccctctgcttaagttcccttcctgagcacagagaactggcagtgagccctccttcctggagctgacactgtctagggacagctgagcatcaagatgctgagaccaatttttaaatgccctggtgctgaaggtatagtgtagctcaatggtgcaacgcttgtctagcatggtcaagcttcgattccccagcacccacgaaaggaaagataatcaaatgatggacgatgctgtgagagtcaaggatgcagactcctggggaggtgacatttgggctaaactctgatgaggagggcataggggagatggataaagtccgaataggtgaggcatagacgaaccaaatatgtagtggtggggtagtgaggtcctggagatcctgttgcagaacagaagccaaatagaatcttaggtcccggaagttattgacaagcggcctgagcatcttagcctggctctggttcctgcctgtcctgtggatgtctgttcccaggcctggagtgatgtagagacgggtgttccaggaaaccatttaaatgcttaggaataccatgcaagtatatttgggggcaactcagaaggcctcgtgtccagatctgcagggtgccagagcctggcaggcacaaatctaaggtccttccctgtcaccaacagaagcagagaagccaggcacccctgtggtctgaggagtctgcatccattgctgggcctgtgacacctctggctgatcttcacaggcttttcagggatatatctggggccccctccttcaggcgaaggtggggccagtggatcaaacactgctgacctgctgttgctagtgcaggagtgagccagtgcccaaggacttgacaactgagtgactatgggagagcgagtcccaggtggctaacagccttaggtcccgtcccatgtggaacagccagatacatgggaagtaggcactggccaggagagcaaacctgcatgcctcatggtccttgattcttgtcctcaaggaggtctcagggacactggggtttgccaagaactccttgggtgtctataaacatgatctaatagcttaagttccattctggctttgccagtaccctcctgtcacctgccctccaacccacccccagcccgcctccacctgtttggcactggctttgaattcctttgtggtagtgcccacgatggcctggctgaccaccatgtcccacaggttttcccgctcagatgagttgtcaaggcaccggcgatctcactcgggtgtgaagccgtaccagtgtcccgtgtgcgagaagaaattcgcgcggagtgaccacctctccaaacacatcaaagtgcatcgcttcccacgaagcagccgcgcagtacgcgccatcaactgagcgcagtggccgcccttccctcccccagctccacgttttgtttttaaatgcaataacttattgcctcttttcagaaggatgtgacaatattaccagccccctcccccttctgaatcttaggaggtatgacccagagccaccatggctgcctttctggggaagacctagagtccctatggtccctgggggctggttccccggtggcccaggtggcccaggcaggcctgtgcccttgtgcctttgtgccttcctgccagctggaagcagtgtttggggggcccttgccctcttcccactgggctccctacctgggccaaagtcaacatcattgctggggaagaagtgttttggctgtgtcaaaatagtagctcccagaggaagcaagccatgctgggaaaaaggaagtgggtcaaaaaagcgtagggctgcactgtgatgtgaggaccgccatatgcaagaggcctttgagggtccaggaggatggccaccctcgctctaggccgtaatgcatgtgcttaaatgcaagacaaatggagccatagccagccgtacccagcctggctcaccctcctccagacaccagacaccagcctcctggttgtggtgagaggagaagggaacaggtctggtggatgccaagcaactagttagtgcctcccagtctgacctagatttgcattcctcatcaggactagaaattagtaccaattgaactagcttgttttgacaggtctatttcacatcctatgaatgtatgtaaataaactgtacataggtacgcatctacataaaatatcttttaataacacgttgacatttgtgtaaatttgaaatttaaaaaaattctataaagttggtgtacatatgttacaattatgtatattttctttggtccttcataaaaaatatatttactttgccaataaaaagaggaaaaaaaaaaagaactctaccattttttggccctgtattcctccactggcctgggacatgggggtgattctggggctctgcttcttccagatcccttcgtggactttgctctctccagcgcatgctccgatgtcacccatgcagagtggctcaggccagcatgtcattgccatttgaaacctctgctgggcccttttgtgtgctgagtgaggctagcatcatacattctgttggccttcctggagaaagtagctgggcggtttcctccctgaacagtgactctgacatttaaggagtcttctccaggcaggggatggccttaggccacttcctctgcctccccaattccctgggaggtttgcatccaggcacacaccctctacaggctgggctctaagatcaaaaggagcagaggacaaagggaagctgtgagtctgaagggaataagcccagggaggtgcccagggctagccacctcagcacctcagctgcaggaagaccttcctggttcacctgtgcacagtgtaaggtgagaaccttctaggaggggacttttcctattgacctcactaaaatagctggatgctgtgtgggccaggatttcccaggagcccctcaagagatctggaagcagctggcaggtaggttttcagcagaaagaccctataccatgtggatattctcacaatgtggagaccactattctgggggcctggggtaggcctgctaatctgtcctgtccggtgaaagctggcagtcattgagcattcatgtgtgaccagtacatctgattagagaatggacatcccatctgaccagcttgtgacctctgccctttgcctgtgaccgaatgtaccttctgaggacaaacaagccctgaggaaatgagacattgatttccagctgcgttagcataatttcccttcatcattaaacaatcaatgcagccatagatacatgggacattgcagggacagaggaggtgatggtcatgttggtggcattgaggtagagacaaaccatgcccaccatggccgaggattaatggatggacatgttcctcccctcatcagcacatcacctgggtatttccatccagcttggctctaaaccatcttggggagaggaggggcgtggatgggctgccaggatcctcacctgggtcctgtattctcacccctacactgtaggggaggctgaggtggggtacagcaagacagagaggggttagggttactgcagcctccctcaaccaacctctcaatgctgccactttgggtgggtttctgctactcccgattgccactggaccttgcacaagaggctgatgacaaagcccctggtagcatgatggttaatggtaagtgaggggttcaagcctatgttgcaacggcatagagtctgggaaactgctctcaatgctttcagtggctggaagagaagtctttgtcctattctaggtgctgagaaggcagaaggagacatagtcccgtggccctgcaattatttgtgataggagaagaatctggaagattatgaaacaggtaaaacgacccaaatctctctcaaggttttagttaagagcagaacactgtgaaattctagtagtaattttaacgttaatggtaatgataagcaatcccttttcatgttgttttccttttaaataaactgagttgtgaggagctggagtaattagactccccaattgacagctgtcacacctttccctggtgccaggctgccgtatgtggtggactgccagccaggcaaattgccagttgccctcatagccgccggctactttgaactctcctggacgccttgaggaactgaactgtgatcagctgctggcttcagaagcacgatgctggttccggagccatatcccacccacacagtggtttcaaacagcttgcccaccacaagcctctctgaactctagatgaccctgtaaccattttcactcacaccagagaggagccttctcttgttggactgagaatgaaggactgtgtggggctagtgtcaacgcagctcatttgcatgaagcgttgcttctgattggtgctggcagccttgccacgccccctttctggatatttctggaagtctgacttacagctcctttcttgagtcagcgagctgcagtgatgcccttgttactgaggcaagcgagatgctagtccagacctgcaagagagactaaagcagaagtggagagccgaggagctctgaagcctcaagaagccgggccccagcctgaaagctcttgacaggaacaggattaccacggcttcccatggcagggctgaggcacattaaagcccagggcaacagagccttcaacttgggcacctggagccccgagtctttggcttctatacctccccaacttgctttgtaactcaaactggcttcaaacttgccacccccacctgcctccgtctcccagggagctctcaccttcccaggaatcttatctgtgaggcactgactgagtttggctcccactgcctggcacacgcgatttaggggcatccctgaagagtgtggggctaaaggtacaacttctatagcagtgggttgtgaggagggacaactggaaccagagaagccaggagcttccacacaagctggagggatggggatgggaactcacaggcaaaggaatcctgaacagaagcagagtctaatgtacaaccatgagctgctccaaaaagagccaagaccatgctggggccacagggaggaggatcaaatgagctttctgtatattgcattggttaatggagtcaaaggcacaggcagggagatctgttgtgaacttcacgggtgtgaaaggggagttggactcaggacccaggtgttagcaggtaggtcctgtttgaattgaggctacgcagggtggagcttcttgtgtggaacccttcctaaagccgcgggtgcgcaacgtccagcatgtgcctcaactttaccctttcactaaggaagagatgaggggctgaagcaattaacagcatttgttgctctttctcaggaccagtgttcagttcccagcaaccacacgatagctcacaaccacctgcaactccagccccacaggatcaaacaccctccagcctatgcctatacacacacacacagacacacacacacgtacacacacacacacgcacgtacacacatacacacatacacacaagtacacatagactaaaaatagcatctaaaaagagatagggatggtcctgctccgggaagacccaaagaaacccagagcacagtcagagtgccagcacaggttgaaggagaggtgtgaggagaaggggaggttgtgagaagtgcaatggctataggaggcaggagaggagagagagcatgtcctgtgagtgcattgggagggataggagggaggctatttggcccttccccagcacaggtggaggaaggaagtatggatagctgggacagagtggagatcagtgccaatgactcaaaatgcaggcccaaaacaaagtttgttagctccccacggtgtgatcactactgaagccatgtcactttgacagaagaaggaggaccacccggggcaccccacagcaaggcgtggttggaatagccttcatcagggctcccattggccactcttgccaatggttaacagagtagctctgactcactggggatgatggtgttcctcccagcctaacagatccctaagctgggcccttttccctttttctttcccctcctggccatcctgactcaatgggaagtctgggtgcgtggctgaagatcccaacactacattgcgagctgaggatgtcccatgcagttgccaaagtagagtgggctgggtctctttcccagaccctatgttagaaatgtgctttattcgtttatttttgcttttacttattatatgtatatggggccgggtaacacacatgacattgtgcatatatggaggttggagaacactttgtgagagtcagttctcaactaccaggtgagttccagggattggtggcagtcaggcttggtagcaagcactcttacctgctgagccatctcagcagccctcaaagatattttcagtgtgactttgctgtcattaagggtttcatgtagaatcgatgtgctgtcattaagggtttcatgtagaatccatgtgctgtcattaagggttgcgtgtagaatccaccacctttactctttctgaaataatcaacttccctggaggccaccactcaaagtttttactgtcccaggctcccatggcttcacttggtatacacatttaaacaatattatgaaagatatggtgtcattatattctgtttataattaataatacataactaatataagataacacatgtcaaaatttaactgtgtattaatatatcacgaaatacataatatgtatatgatatagttgcaataaaatagtacataatccagtaatatgtgtacagagtttaaataattatagatatgatgtcatttccaattgaaaaaattagattgactttatttttgtgttgggtattttgcctttgtgtctatatgtgtgcattgcgtatacagtacctgcagagaccaagatcccctggatctggagtgacagatggttgtgagctgcatgttagtgccgggaaccaaacctgggtcccctgaaagagcagcaagtactcttaactgatgagccatctctctagccctgtcacttctaatttaaataccagcgcagcagtcgtgtgtggtttaacaataggaaattatcctgctaagtgtcactcagtgtccatagtagagttactttgataacttcagtaggtactgccatctgatggggacatcatctatggcccacaattgactgacacattgtgtggtactctgcatatcatatgcaacctaactcggaacagtccctgactatgacaatggccttctctgccagccagttgcttctgttgttcttccttcccaactctatcttcctctaacttttcttggggcttcatattcctactatttgaagtcagtggaagtgcaaagaggcaggtgccatctccaaacaggccaacaatgctagcatcttcctcacaggacacagagaagctgaacggagcagacagtagacagatcctggccgatggtgaaagattcaggggtttgttagtgacactagaattagaacctggagcgtggtgtagacacttccctcctggccttcccccactagactcactgctggtcttttccttgctacttataactgcttgcagtgtttctcaggtctcccttttgccctaaggactgtagtgagacagttgtccggagcgagcccagcaccctcccactgatgtttcattgaaacaagtgttctctggtcactgagcctaaatgtcctcgcagatgggcatttgtaagaagtgaaagcctggaaaggctccttctccgtgctctctcacaggccattaactttccaacagccagaacacctaaagccactgtgcaagcaacggctgctaaggaccaagcagtacgtgagatacgtaagcagtgtgaaatgcagggctttacatggctccctgggctccctgggctgtctttgcattttcctaaacaggaggctagtcatctgactgctccaccccatgcttgtcctgggggctgtgcgtacgcctgagctagcaactctcccttgctggctgtcacctctccttcactgtccactttccttctccatatagaggtgattacatggacttcaaagttattatccccatcctggagaaccagggagctgagagcagagatctttctctgctgcctcgctggacactaagatagcagtagacattcatccctcagctgaagaggccagtggacatttctcttgggtacccatggtgtgaattggtgactcttaagtttggatccccagacttgtgcataagggaatcatattacattcctggtctccattctttgtgctcagctgccctgccaccaccctggctcttctggagagggacagattgtctcttcaagccctactcatgtcggcacaggcctgctttgctgcacatgcagcctaggtatgcaggaggctgcacatacactctctctgccgcctacttgagaggcattctggacacaatggccatgtctctgagatgttcccaggctgttcaagacactgagttccacaaacttactcacattctcaaacagcagcacacgcataaacaaatacaactctgtattgtctgcaaactcttgtgacttagttcatttttcattactataatgaaatacaggaggtaagtactttataaagaaaaatggtttattttgctccattattttagttcaaggtcaaaatgatgaccttccaacttgacagaggacagacaaggtgacattacctgggagacagggagttgtgtacatggattggggaggtgtttctctctttataaagatgtaaagattcaattgccactcaccagggctgcacttcatgccctaatctaaatttttcttaggttttttaaatttttatgtgcataagtattttacctacatgtgtatataaatgtgtgtgtgtgtgtgtgtgtgtagcacatgtgtgcctggtgcttggggacgttagaagagggcatcgcatcttccagaactggagttacagatgactgtaagctgccatatgggtgctgagaactgagcctgggtcttttgcaagagcaacaggggctgaaagattgctgagccaactctcctgctgcccccaccccacccccactcctatctagtcctaaacatcattcaagtccctgcctctaagcaccagttgatggtgctttttaattactgccttcttaataacccaacaatggggattaaatttcaacacaaaaagccttggatgacacaggaaagctgtatcctaatgatgccaccttgctaatgtaatacaagataaaaaatagtagaggcaataataggatagaggcaaggtgaccttttgtgtccatgtggcaagactactaagagattaaatgatcagaggatggctccgtgcacatccagacaatggctagaggagaggcaggtaggtggatcagatcatatgtgacaccatgccatgtagtcatgctttagctctatcctcaggagtgacagtggtttagcatcaaagctatgatactgctcatggctgggagtctgctcacttaggctcatcaggtgtctctgaacaaggacgaggttgggcctaagctggccagccatgccagggctcagctctatgtgttgcttcctgtactccagaaccggggggtacagctgggtgtgtgcttatggtaaggaggcaggaaacccactccagagcttccttctcagagaaagcagtgggctgtgaaggagcaacgtgtctagagtagcctggggtctgggagactcagacactatcacggggagcacaaggaaaggaagatgcgttggggagacagtgttgctgagggcaggcaggaagctgaggaaggagcgctgtgggggagagacaacctccagtcatctccccattcccagagcttccgggtgctgggctgcatggacaggctgtgcatgcactgtttgcacttgtgtgctgttgtctgttcaaaaaaaaaaagtcgttgcctaccacggtcaataggccaagttactataagacccacaaaaccagggattgccgtggaggcccctggacctctttggggtgggagggtagttctgccaaacagatgtgggttgcatctgtatttccactaaaacagtacttttagtgggaagagtcacagacgcgatgtggtttttgttttgtttttgtttttgtttccctcagtatgatctctaatcaagatcatcaggaccctcaccctaagttgttcttcgttttcactcctttgccaagggaagcaaagatccccaggctgggtagccttcaaaggaagagtagcactggggaagagaagcatacctctgcttcctttgatgctaccaaggcccttttgatgcccgaagcataaagcaggaggagaccaactcttccaaggctggtcagtgagccccaggagaggacagcttcacacggaagaagtggagggcttagtctttcacagagggagatttctgtccacagggaaggaaggcaccaggggttaaagccatgcgtggagatctcttcagactcccacagccctgaagccttggctgcattgactcagcagtaagctcgtttctctttacttctagagtcttccacattttattacattgttccctttagtgtgcatgactggagcatgtgccctgtgcattggtggaggtcagaagacagcgtacgcgagtgagttccctgcttccttcgtgtggaaccaaggactgaacttgggtgatcgggcttggaacttggctggctttgaactcacacagatctacctacctctgcctcccaagtcctgggactaacggcatttactcccatacctggctcatttaaagggactttattcacacagtatgattactgaccatgatagagccaactcagaaatctgaaattatagggtacttagaagatgcacacacacatttgagaaataaatcacacattttctttcccccttctgttttatttgtctgtgttccacgtgtgtgcagtgcccgtggaggtgcaaagagggcatcggatcccctgagttactgacagttgtggatcaccatgtgggtgctaagagctgaatctcaatcctctgcaagagcagccccatagctcttatggctgatctgtctcttcagccccacaatacactttcaataattctctgatccaagcaaaacattaagaaggggaaaattaagtcttttaaactcaactaaatgaaaccacatgaaacgttatggcttgttagtagaggaaattgatagagttaaatgcttacactggaattggagaaatgggctcatattaatgttctcacctttcaccttaagaacgtgttggttgggtggggggggggtggtaaatgaagtctgaggaactctgaagaaaggaagcaataaagccctcactggaaatcgtcacagtggaagcagggactttgtgtgtgactttgtccttatctcctcttctaaggacaccagtcagattggattaggattgggtgtatgtatgacacaatttgacctgttggtcggtgggtggagactgccttctatgtctagctgggttcttgtccaccctccctccattaatggagtgaacagacagtggagtaaaattctaagaccctttgtgccagcaggatgccagctgagattctatgagtaccagctctaaggccagggcaggtttgggggtgcctaggtgagaggttgctgatgctacactcccctgtgttcttggcaggcttcaggatgccatcttagtgcagttccttggaaattatatcagcaggtcacccataggaatagcagaagcaggtctctcatctccagcaagtctctggtagctggggtaagagaattgcctgcagctctatttgcatcccagtgactgggtccagtgagcttgctgccctgggctgaagcctcgggtgtagaaagcctttgagtctgtctctgaagactcttgaagcagaaaccatcagggaactggcaaagccaggaagcaagatctgaagtcttccttcctaggcaaaaatggcttggatcctcaggatggccaaatttattgagaagcagttgagctgcgattggctgaacgtgggtttataaatagggtggaagatggggccaaggagagaagagccttacaacggtctgtttctggctgttctgtgttgctagggtaatctttcaggcttggtcaaacttgaggctgggcttgtcaaaagctgaagcttccccaaagctagggttttgtttcttccacagctgctgcccacggacagctaccagcagccagctcttcaccccggggacttgaacttcagcgtctgataatcctacagcaggtaggaagctctgaatcaggtgtgcccccccccagcccctattaatggcccctataaaagaacccagctaaaaatataagacaagttctatgttctatggtcctgtggtcacagcctcaacatacacttcaaccaaaactccaaaggtgtgacccctgggacccctgctggcttttgtaatggttagcttaacccactggaccatctcaagaacactgaaggatcgatccactggcatcacgggaagctggttggctgtgtctgctgcagctcggtgtcattcatgtgcccggcagcacctgagcgcccggaagattggaggctgcaggaatcttgtgaataaaggtgtcctcattcacttctgaccactgacatgaggtccacaacaccgccacagcacccgaccgagtggctgcttggcatggactaacatggcttctgttgtgttacaaccctgagtgttgccagacacctgagggaaagcgcacagggatggtgacctgggacagctcagacaaacaggggcagtctcttctactgtgttctggtcactaagcttcacccatgttcaaaggaagtaatgacaagcccaccctaattccactgcaggaggagtttggggggcgtggcggggcgggggcgcatgttacactgagcatcttaggacaggcatccgtgtccatcctcctccttcctcggaattcacctggactctgtaaagagatgtgccgtgatgaagaacagctgtcactaataacccctcagggtgtgttctatcaggtaactatccaaattatccaaaacagatgctcttaactgcaaacttcgtcttcatcctgaaacctttgcttttgccaacactgaggtcacagagcttattttgagcatggcacgaaatgccaatatccgtaccactgtgaaccccaagtcacctccaagtcatcacaggcggccctcagttcattcatccgggagtccagaggagctcacctaaggttcacaggagctgcattctgcagggtcctgctcgtgaccacgcccacttgtgcacctaaataaactccgggaggagaccgcccacttccaactgcttcctttggcttctctgtgtgcaaccaagttgtagaactgagaaagccagaaggacatggagagggagcccccaatttcagctgccctggaggatctctgatcacaccggaagctgtccaggatgccagcatgagatgcctgggtaagtagtctcggggggaggggggcagagcgcccacttccgtagggctcctcccttacccacccccatttgccctttttgaatcaagggcttttgggatcttagcttgttttgtactggggtttgtgaaattgggtttggggatcaaagttaatgtttgcatgcaagcttgatagagatcagttctggaaacaattgattgttggtaatttgtcctgtgtgtgtgtgtgtgtgtgtgtgtgtgttcaaataatgatcaaataaccaaaaccataacattttttgtacaaaccactttcccacaactgtttactgagtatttggccaagtttatatatgcccactctgtgcatgtggtgccagaagagcccatcagatcctctggagctggagctaacgatgactgagccatccaatgtggggtctggggaccaggctcaggtcctccacaggagcagtgtgggctcttaactatcttaaccaccaagccatctctctatccttttctaaacccccttgctggacatgaattatagtgtcccctctcattctgtgggtctttcatggccttgattgttcgtcttctgggggaaagatttggttccatatgttcacatatcctacaatgaccttgtccatcttcctccccagctgtgcctccacccccagttcctagaaattctacttattcataagtttccatgcataagaggaaacataccaaatgtgtccttgtatctggattattttgcttatcatgtcctttccagttcttgcttttcctgcaagtgaatattgcattcttttttgtggctgactgcactgattgctctcagcagccagaatacttaagagaggaacttaactgatgaagggttctgtgtggctcagaggattcagtccatcatagcagggaagtgggacaaagcaactcaaatcatggtggaccggaagcagaggaaggaagggatttcagacctggtatgaccttgcaaggcatacataagtgacccacatcttccagctaggttccagaattcttaaagcccctcaagaaaatgccaccagctggagactaagtctttataacatgagcctgtagggaggtgtttcatatttgtgctggttaggttttttgtttgtcaacttgaggcagctaaggtcatctggatgaagagagaacctggaatgagaaaatgccctcaccagatttgcctgcagacacatctgtgtgggcattttttgattactgattgatgtgggaggagcaaccatgggcagtgccgttcctggacaggtggttctaggtactataagcaggctgagcaagcctccaggtctctgccctgatttccctaggtaacaaactttgcctgaactgaagaattgaaacaaatttatctccaagttgcttttggtcagtttttatcatagccatggaacgcaaatcaggacaatattgaaagcatagcactggacagaactccattgtctaaatagagcttatcttcatttttatccatctctgtgcaggtgcctcttctcattccataacttagctacataagtagaacaccaatacacatggatacaaaggcatctcttatatgccgacctcatttcctctggataaatatccagaagtgggagagccaaatcatatgatggttttattttcagtcttttgaggggtttccatatggtttttcataaaaactatgttctactttacattcctgccagtgatgaattgaggaaggattccttttggtccagaatctcatggtaattttgatttgtgttttcctgatggtgagtgatactgagcctgcttgtatgtattggccacctgaatttcatattctcagaacaactacctctctgtctgtgtgtctgtctctgtgcatatgtgtatgacataatttcactatgtaacacaggctggcctagaactcacaatcttcttgtgccaacttcctgaactggaattacaccgcacctggcaatttgcccatttgtaactgacttacctgttttgttgttaatgagtttttgtagttctttatatattctatatatcaatgctccatcctatgagtatcttgcaaccatcagctctctatgttctatctctttattgattatttccttggatttgaagaaactctttaatataatctgatttgtcagttcttgtttttgttttctgtgtttttgaaacccttctcagaaaactgttgctatgtcaatattttgaagacttttctctttggttttccctggtagttttagacaatggggtcttacattaatgtctttgttccattttgagtttacgttggcttagggtaagacatggggatctgatttcaaccttgtgcatgtgggtagcccgcagccccagtgccttgtatatgtacttttctctctctcctcttttttcctttctttctttctttctttctttctttcttgtttgtttgtttgtttgtgtctttttttgagatagggtttctctgtgtgcatccctggttatcttagaacttgctctgtagagcaggctggcctcaaacccacaggtccacctgcctctgcctctgcctctgcctctgcctctgcctctgcctctgcctctgcctctgcctctgcctctgcctctgcctctgcctctgcctctgcctctgcctctgcctctgcctctgcctcctgagtgctaggattaaaggcatatgccatcactgtccagtggtctgtacttttcttgttttgttatgcccttgccaagttgtggtaacagggcagaaggaaggctccttttgcagaataattttagaagtattgttgatagcttttctgcaaaatccagcaatgataacattgggtctgggcttttctttgttcacataaattccaagagcttttagtgattattttagaaagttgtatattaataagatataaaatttagaagaaatggacaaaattccgggcatgtgcaatatagcaaagttgaaccaagaggattaaaaaccttatacatgtcaatatcaaacaatgagatccagtccatccattatctggttcagtactgtctgccttcatagacaatgttcagactcttcagatggcatctcttgtgttttcaggactttgaagattagagaatctgttggcttcctgtacgccgagataatcaactgataaagggtttaacttggctcttgatttcagaagtttcaggccatgatcagctggtctcattgcagaacaggtcatcatggcaagggctggcactcttgccaggaaatgaaagaggggaagaggccagggtccctcagtctccttcaaggactcgcccccagtgccattcagatctgccactgtcttagtttctactctctcctaattgtgctgccaagctggaaccaagtctttaaagtaggaagttctggctgaatgttcaacatccaaactaaaccagagaatgtaataaaagtcccaaggccatgcctgtaatctaaaaggtgggtatcagcccctgagcagaaggcatctcaggaaggcagggactgacatccatattgtttaaatatttaacatgaagtaaatataaatgcacacaaacttaatacagaaaaagcagaagtaggatcattggcgtgtattcgggttgaggcccacaacccgtgagcagcacagtgccgggcctgtgctgtgttccaaatgacacagtgatcttctgaaggcaccatcagaaagcttcatcagggtgttattaaacatgggagtcacaatctgtacccaaaatcagatacacccgctcgacctcaataagcctattaaaagactgggaagctggaaatagagattttttttttaaatgtggttacattagaaagagaacagagatccatggcaggaaccttttcaagtccatcttccaggtcctgaagtgagatcaaagtttaaacagagaccaaggatgtgcacatctaagcagaccagacaaggtatagtccccacctcccaacacacacacacacacacacacacacacacacacaccattgaatgatcattgtctggccttgagtctcatcctgcaaggaactctgacaagctgttagagctgtgagaaatctctctggcagaaagctcccctctagctgcgaccctttccttctcccaagatgagattccattggaaattcccattttaggggaacccattgtttcatagatagattgagagacacaagtatctctctagaatagcttcatttctgccaggcctgttacaaggacactgcaatagggatcctgaccatcatgagggagacaccgtccccatcctgaaagcagcaaggtagaatcagcagatgggaaatgacagagagacttcaggaataagggggattgtggtcacactcacctaggataaatgctgaagccaggccaggaggccagacattacctgggggtggaggatgagggacccaggaaaacatcgttgagggtgagcagacactgagggtaagctggcttcatttcatcttgctaaaattgcattttcacaagtgcacagatgggtcttggagtcagttcagaattccagctaaagcttggccaaacagagtctctctgtcagggtacaggcagcttatggttggcagacatctaaagctggccacctccctggatgggtgagaaagcagctgggtcgggctagggcagatgctgtgtgagtgtggaagtacagtgaataggccaaggactccagccatgccacttcctggatgcaagctggggaggaggtggggcttcttgggggaccaggccaacaacaacagtacctgtcctagctgcacggagcaccaagtgagctgctgagaccagggtattattgttagcttttactatcagaaacaaacatctgggattcaattgtgtaggtgtgtatctgtgcatgtatgtctatgtatgcctaaaagcatacatgtggccctgagtgaatctgtgtatgttgtatgtatgtatgtatgtatgtatgtatatgcctacatatatgtgtgtatggctatttatgtatgcataaatacatatatatgggggctagagagatggctcagtggttaagagcactgactgctcttccgaaggtcctgagttcaaatcccagcaaccacatggtggctcacaaccatccgtaatgagatctgacgccctcttctggtgcatctgaggacagaagaaaaaagaaatacatatatat

SEQ ID NO: 1049 - DNA, 12686 bp, Rattus norvegicus
  source 1..12686: mol_type = genomic DNA
cggagagcagggagagcggcgagcggcgagcgcctagctcggccgcagggagtgcgggctgcggccaggagcgctggacgcgcggccgcatacggagccgggccgcacgcgcgaggccgtgccaggcgacgccgagtccaggtgggagacgcgcgatgtaccgcggccgcttgggtcctcctgtccgaaccacgcgcggggacccgggaaatgtggggaccccggaaatgcgggaccccccgtgagcgcgctgggccttcagaaggcaaatccaatgtgcgcagttcctgtccccagagcccacgcgtgtccgtggcactcctggacctgcgctcccatatggcggcgcctggcggggcctggcgaccaaggggcggagaggttactgtcggtcactgcagcggtggcctaagtggggacgcgaagggggtcactgggcggaaggtaaggtactctctgaagctgtgcgccagagtccgagccacctccttcccacgtacttcacacccaggggtgggcacccacgcgcgggcacctggcggacacccgcacggctgcactgcgcccagcacacgcagtcacacgacacaaactcacacccatttgcgcgtacccgcagcgttcctgcgcttatgttccgtttccccacgcagagtcctcaggcccctttgaccaaacattacccgagggctgagggtagcagccgcaggggtcaggtcacccctcttggaaacattctcgcctggaaggcacaggagctgtttgctaccatggtttgggaaggtgaaagcccaaatgtttgactgagtccttcagatgttttccccgaccgtggggagcccccgccgccctacaggtgccagaatggcagtaactttggggccttcggactcctcagggaggactcttattttgaagaccggcccccattcgccacccccgtgatttgcacgctgacccaatggctagcccttggccggctctctgcttgttatcaattacatgttgttcctacagccgctgtgtccccgggaggataaacagcaggcctggcctgctaagagagggggcggagtccagcggcctgccggggactgtgcccagaacagggtgccccctccccctgcacgcagcctgcgcctctggctgcgccacgtgctgctgtttttcagggaccggcttgagcgctggcactcaggctttcaagccctgggtccaggaagtcctggatcccctgggcactcagtacctcactgtccccaggggttgcttagcaccgttttaagatcgtgttaactggttggggccactccactcctgcatccatttgcttctgggttctggactcgttcagcaaaggttagatctgtctttgactctagatctagcctgtagtgaacaagacagttttcacagtgatatccggctgtgtagaatataaacctgggtgctttctccaagggggtagtgacttctgagttgagatttaaataatgaactcccatctggaatgctgagagaggtaggacttccactgaggagaacactggagccaaagcccaggttcattagtgctggtgagccaggccgcagcagttggaggggcagttcggggttgagcagggccctagtactctgagccctggaggaatctgaaacattttggggggaggggttccttccgatgtaattctgttttggcatcaactttcatacctgttctctctctccctccttcagtgggatctcacatggttgcctttgactttatgattctctggcctcagccttctgagcgccaagactatatgagccactctgcccacccaacactgctgttcacttttttttttttttttttttggttctttttttttcggagctggggaccgaacccagggccttgtgcttcctaggtaagcgctctaccactgagctaaatccccagccccttgctgttcactttcatatcagaccttggtttttaccgttttaaaaatgaagcctcgataccacaatcccctttgaaacagtgggatcgatcgctcagtgctgtggcgtgtccagctctggtcacatttcatttcaggaaatcttaggcagtcctgttctgggtcctgggacaccgtgtgcactgaatttgcgtgactgtacagacgctaagtgctcagtatgtggaagttgttgagtattcgtataccctacgtataggagccacgtcacactggcagcaaacagatgtgcgcacagagacgttgtgctgctttcctgaggttgcacagctgacagctgcagacaaggtgtgtgctagaagagtgaatgagatggggttgggagcagggagtgtgtgggttctgcccaactgctttgcccttcacgttgtctagtgctttattccttcccaggccgtgctttggtaaagactatgtattttaaaaacacatttccagtttgaaatccttagcagagtatttaaattcagattgcctcttggcaagattacctttgggctcagatcttgcctctattctctgcatcaagagagaaacttagagaacactgagtcatagaacagttggggaaactgagacacgggggagtgggatgactggcctctcggctgctgggctaccaggtgccaggctgtgcagtggacctaaggtcaggatgcagcttagcatcctcctcatcagtttgataataacacaggcagccatggtcactgggcggggcaaaggtccagagaggtggccccagcacagcagatactgttgactcttcttggacaccagacctagtatggcctttggcttcagaggacacagctttcccttctccttcctatccccactctctgagcccctcttggatacctggtgtgctgagtgctggggacccaggagagtgtgctgccaagaggggacacaggtacctgctgagtcttcccaagtcggtgagtgtcccgcacaggaagctgggtggggggcagaacaggagactctgctctcacacactggccaagggcaaatgtcatctgccatcctgcccaaaggctctgaggctcacggaagttacccacacctgggccctcagatcttctatggactcacagctgggggctgaaccttaatcatcatggcagggagatgttaggcaccatggaagggggctttgctctcctgtgatacctcatccagtcatggagaaccgtgactctcaacaaaggtctgaggaccagactgtggagaaacaccatgtaggcaggcaggcacttaatggccttaaaccgttttccaaagtacagctgccaggttaaagcacagacaagatgtgtgtcccattcaaccctggggacaccacgcttgcattcacagaagttcatttttgaacatctgaagtgaatatctaacaagcagcctgtgtttttatttgctcaatctggaaaccccacagaaaccccaatagcccaggctcagagtgcaaatggcctttttctttctcaccccctctctgactcaaggtagggagcagagtccagggtcttgcgactttcagggcctcccctctctggccccctctccccaccgcctcagctgttcacagacaagagcattccttgtcttattcttttccaggatcattctggaaaatgtttgaaaccagaagtgccctgggttgtgcaacgggcctggagggagggctcttttgcaaatagggtgatgcaacttttgaaaacatactcgccggcccattctcccttgggatggaagcaagatctggacatttggccacaggaggccttgggcaggcagccgggggtaggggttacaaaccactggtaagcatgcagtccttctaacctagcctcccttgttccctctctgcagtcaccacaggctcggccaggccagcatggtggaccacttgcttccagtggacgagaccttctcgtcaccgaaatgcccagtgggatacctgggagataggctggccagccggcagccataccacatgttgccctcgcccatctccgaggatgacagcgatgtctccagcccctgctcttgtgccagccctgactcgcaagccttctgttcctgctatagtgcaggtccgggccctgaggcccagggcagcatcttggatttcctcctatcccgggccacactgggcagtggtggtgccagtggaggtgtcggagatggcagtggccctgtgacctggggatcgtggaggagagcctctgtgcctgtgaaggaggaacatctttgcttccctgaatttctgtcaggggaccctgatgatgtctccaggcccttccagcctaccctggaggagattgaagaattcttggaagagaacatggaggctgaggtcaaggaggccccagagagcagcagcagggacctggaagcctgtagccagctctcagctgggtcacaccggagccacctccatccagagtccggtgggagagagtgccgtaccccaccaccaggtggcaccagtgggggtggtacccaaggtgcaggtgaggggtcagctcatgatggccccatgccggtgctactgcagatccagcctgttgctgtgaagcaggaagcaggtgcagggccagcctccccagggcaggccccggagagcgtcaaggtcgcccagcttctggtcaacatccaggggcagacctttgcactcctgcctcaagtggtaccatcctccaacttgaacctgtcctcaaagtttgtgcgaattgcgcctgtgcccattgccgccaaacctattggctcaggatccctagggcccggccctgctggtctccttgtgggccagaagttccccaagaacccagcagcagaacttctcaaaatgcacaaatgcactttcccaggctgcagcaagatgtacaccaagagcagccacctcaaggcccacctgcgccggcacacaggcgagaagccctttgcctgcacctggccgggctgcggctggaggtcagtatttttggacaggctgggcgtaaccaagtaggctcacctctgctcacctgagggtgtgacaaggcccctttctccattcgatgaggtggattgggagaggagcaagggatgggcggggcgggggggggcaggatcagagatggcacagttggtgtcccacttggagactaaagctggaagccacctggtctctggtttctttaagaccaggtaagtcttgctgagacttgtgttatatgggctctctcttgagctgggatggaaggaagatgaggggctgggctgaggtggaaggaaactcagctaaggggcagatgaacttggtggcacatgggcacaagccagagcccatgcaggccttacagcacctccaggtaagtaccaccactacgcccatgacatttcatggcaactctggctaagaaccaccaggcgacagcactcagagtggaacatgagtcctaagacttgaactagaaaataccacttccctccagccaggggatgaaaactgcacccaagtaggagttaagatttgccttgtttcttcctggggacctggaggtgtgtttggaaagtcatagagagcaaccagaaggcagggtagatggctgtgatacaggctcaaagatagcagaatacctcagacttacgttccagacaatggggtgcccagctcttcaggtcaaggagcctcagatggccagatgtggtgccagggaccatggaaccctgcagtcaccctggcctggtctctgaatgctgatcatcatcttcaggagggtggtggcctgcaaaggttcacatatttagggtgatatggtgaggggggtgggtgctctggccttggtagctaggttgtgtgccagcagtgttggtgtatgcatgtgtgcgtctgtctgtctgtctgatgtgattcacctgtgtgctaaggactgacagagctggaccacctgaatggatgcctgctgtgtatgggaatgcctgcttacgtattgtgtgatcacatggtcacacgtcacagaggtgctcttgtgaggcagcctttggatctgagttggtggtgttgtccccagggcaggtgctgccctgctgagactgaacatggagggatgagagaggcagaacttcccttccagatccaattggtcagcaaagaaacttttccccagcagtgtcttggattgtgaaggcccttcctgagagacatcactgtcttctcacaactttttaaatactgggctccctaaaactgctgtctccacctctctgagccatgtttttgtgagtagatccagtgtagggctgtgaggtagttaagtgggtgagttgtagagcaagaggagcccggacagagaggcctggggtgaggggtgtttactgaggaagggagagcaatggaccctggttggatgagacagtaggacaggggccctgagcccaccctgggattgcgggttcttgtctggtcctttttgtttcctggagccctgagctattgtgggggtctcagtgtgcactcttttcatgaagtgaactttcactttctcatagtcaaactgaagaggaaacccaaaggtggccttcctgggatactgacaggtgttcacattcacagggactgctcatgggcaagccactgaatagccttcacccaacagtcctgactccatggcttactctgactggtactgcccatttaagtggcatctccagagggcaagggaccaggtagaagctgcaggctatgagatatctcccaggataagggctgggagataggtcattgcccaccaccataggtcctgctgctccaggaaacacaaggtgtccaagggtggcccttgctctgaccatgagccttgcactgcagtcattcaggcagaacccactcagcaagactagggacatgctatgcctatcaagatccctgtgtggcatctgcctcaggaaagggctggctgtgtgagtgtgtgagatccttgggatcttcttgggcatcagaagcccaggggttgtgcctaggaggtttgcaattcccttcgtgtgaccaatcttccacccagaggccgtgggatgggcagcaattcctcgtcacagttaggagggaggatggaccccacgcactctggatctggccgggatggaatgagatgacaatgaagatggtattggtgacaggtcacactcagggatcaccatgtcctggaaggataccaagtccccaccaaccccttcacttgtgtatgcccattactccctgagactgatctgtcctgcagagaacatgttagagtgtttgaatcccagtccggccttctgctctggcccacacactctccgatgtgcaccctggccttccccctttctcaagcaagatcatctatgttcccccctcctccctcccttcctctctccccccatgggcccagggatgctatggtgtctcagcctttgctgtgcacctccaatacaggcgttagttcatctcatcttcacaacagctctacaagcatctgtagtaatccacattctgcagagggaaatcgaggtacagatcaatcatctgtcacagggatgtgcctaatgagtgtgttttgggagttggggtgcatccctgtgggtgccacaccccactgattctccaacagccaggaatggaagtggccatggcgtatgctgtgcttcttcagggcgtgcgtgcgtgcgtgtgtgcacatctatgttttggtagacacgtacatgaaagccagagatgcttgtcatgtttcttcctcagtagctctccaccttgctttttgagacagggtctctcgctgaacagagctcatgggttggctacgctgtctggccagtgagctctagcctgtccctgccctaccagcactgatattccaggtagacctactaagttcagtttttatgtaagtgccaggcatctaaacttgggtccttcctcatgtttgcccagcaagcactttgctgaatgggccacatcctcagtccctgggctgtactaatcttctattgtgctcctggctgtgggaaaggagacagcagcaagcagctagcatggtggtaacagccctgacaaggcaccactctgagcatgctatatgttagttcctttaactcttaaaattagacgatgaggtgggcccagaggtggtcatggagctcaaaagtggcagagttaccaggtggtggtgatggtggtggtggtggtggtggtggtggtggtggtggtggtggtcgtggtcgtggtcgtggcggtggcccacacctttaatcccagcactcaaaggcagaggcagaaggatctctgagttggaggccagcctagtacagaataggttccaagacatccagggctacgcagagaaatcctgtctggggctggggtgtggggtgccagagtcaggagtttaacagctgtttgctctctcgctcaccctagactcagtacttctccacactcctgcacacctccctgggagagcctctaaggagaggcccctcctccacctgcagctgggcctggctcgcccagcatgttctgtgctttccatctggctctgctgctggcactgggccctgagttcctaaatttgcccaagcccttaccctacccctactcctcaaccctggggactgctccacagctgaggagacacctgtcccagttcaaagcccaccgccttctgcttttgtgcacccaagattccctatctctctctctctgttgggtcatacttttgcatgcagtcctccagcctgttctggtctaaccatctgggaagtggctgtttgccgccttcctagaagtttcctctcactcacagacataggcctcctttgttccctgcagtggaggaacatcctgttccagagtggccaagccgctccttccagaaagaatctcgctgggccatagttaaagtgaatattaatagctgtcagcagtctgtgtggcatgctctgctgatgtccatggtggacacagaaggcccagagagagacagtggattccaaagccactgttggaggagctggacacaggattcaaactctgtggtctggtttcaggccagcatttttagccctcattacggctatccataagcagggctgtgtcctctggccttgtggttagtagacactccatgcactatctgcaggttgtgcaccgcacacacacagccgtagggcctgcagcttctgagatttggctgttgacaatggctttctgacagatggcaactggtgtctcacacatctcccatgctggcattactggtggaccctgtgcttactttgctctgtgacccaagagcagttgtcataagcctgccccacagataccaggcaccagatctttgccatgtatcaggcaggctctgtgctctgccccgcgccttcagtaggatctcacagttcttaaacaattgccacatctgaagcctcactgccacggtcctctgaagtaggtctgccatttctgtctcaaggcagggaaactcagatttgacaggcttgtcaatgcacccagaccaatcccaaggctgtgtcccgtctagctgagatttctcatctcttgctccagtgttgccttagggttctcctttggctgttatcaaacaatgtgacccatcttcagtccagttacaaggacagtcttgtcaggtactcagaagctatgcagcagagaggggctctggaatgaggacagcttgttctctggcatggctgcctctcagctgcctgtctctcttagggtgtcatataacaagaggactgctacccattccctggaaggcaggcaggaagtgaaggaggaaactcaggcccaggatgctcgggattattggagtagagactgtgaagcctgttcttccttgagcatgggtgtgtgcccaactcttgcttggggcatgcgactatggcacagggtcatagcactggtatcagcctggtatcagcactcccaggccaggggaggagactttgttctggcctcaggtgttctcaggccacatctctggaccaggtctcctgatgcctaggacagagttgtagggcagcagcttgcacagtagctccaccttctctgtcagaggcataggagattgaggtccttggtgtcctgagccctgtctgctccaggtaccactgttcttctcatgtttcccagactgaggtcagtgtggcccactacaggatcagctgagatggccatagccctggacaaccgagtgtgatgcctctgctgtgcacctgctctgcatcaccaagtggcccctgtctagaaacagggtgccaggcctggcgctcctgggtgttcttggagtatatacagtgaacaatgtgtgacaatccagtctcatcctgaggtgccagcagaggcccctctgcttaagttctcccccgagcacagtgaactgggagtgtgctctccttcctggagctaacactgtcaagggaccgctgagcatcaaggtgtcgagactaattttaaaatgccgtgggattgaaggtgtagctcagtggtgcaatgcgtgtgtagcacgttcaaactttgactccctagcacccacaaaaggaaaggtaatcaaatggtggactacgctgtgagagagggtgcaggctcctgagaaggtgacatttgggctaaactctgctgaggaggggatagagaagatgggtggagaaaagtgtgaatagctctgaggcacagaggaagcagacatgtagtggtggggtactgaggtcctgtgatcctgttgctgaacagaagcggaatgtgagtctcaggtcccggaagttattgataggcagtctgtgcatcttggcctggttcttgcctgtcctgtggatgtctgttcccaggcctacagtgtctgagaaaggggtgtcccagcaagccatttaaatgctcaggaattccatgcagatatatttgggggcaactcagaaaacagcacttccagatctgcagggtgcctggcaggcacaagtctaaggtccttccctgttgccaacagaagcagagaagccaggtactcctgaggagtctactaacattgctgggactgtgtcacctttggctggtcttcacagtcctttcagggatatgtctgtggccccctcttccaggggaaggtgaggctggtggaccaaacactgctgactcactgttgctagtgcaggagtggtccagtgcccaaggactcaacaactgagtgactatgggagagtgtcccaggtgactaacacccttaggtcccttcccacgtagaacagccagataccttgggaagtaggccctggccaggaaagcaaacctgtgtgcctcgtggtccttgactcttgccctcaaggaggtctcagggacactggggcttgccaagagctccttgggtggctatagacatggtctcatagcttaagatccaccctggtcttgcctggcccacagtgccctcccaccacctgccctcctacccgcccccgcctccacctgtgtggcactggctttgaagtcacttgtggcagtgcccacgatggcctggctgaccaccgtgtcccacaggttttcacgctcagatgagttgtcacggcaccgacgatctcactcgggtgtgaagccgtaccagtgtcccgtatgcgagaagaaattcgcgcggagtgaccacctctccaaacacatcaaggtgcatcgcttcccacgaagcagccgcgcagtacgcgccatcaactgagcgcagtggccgccctcccctcccccacctccacattttgtttttaaatgcaataacttattgcctctttcagaaggatgtgacaatattaccagtcccccttctgaatcttaggaggtatgacccagagccgccgtggctgcctttccggggaggacccagagtccccaaggtccctgggggctggttccccggtggcccaggtggcccaggcaggcctgtgcccttgtgcctttgtgccttcctgccagctggaagcagtgtttggggggcccttgccctcctcccattgggctccctaccagggccaaagccaacattatcactggggaaggagtgttttggctgtgtcgaaatagtagctcccagaggaagccatgctgagaaaaaggaagtaggtcaaaagcgcagggctgtactgtggtgcgaggaccgccatatgcaagaggcctctgagggtccaggaggatggccaccctcgctctaggccctaacgcaagtgcttaaatgcaagacaaatggagccatatccatccatacccagcctggctcaccctcctccagacgccaacctcctggctgtggtgggaagcgaaaggagcaggtctggtggatgcaaagcgactagctagcgcctcccagtctgacttagatccgcattcctcgtcaggtctagaaattagtaccaattgaactagcttgtttcgacaggtctgtttcacatcctatgaatgtatgtaaataaactgtacataggtgcgcatctacataaaatatcttttaataacacgttgacatttgtgtaaatttgaaatttaaaaaaattctatgaagtcagtgtacatatgttacaattatgtatattttctttggtccttcataaaaaatatatttactttgccaataaaaagagagaaaaaaaaaagaactc

SEQ ID NO: 1050 - DNA, 1929 bp, synthetic construct
  misc_feature 1..1929: note = Synthetic
  source 1..1929: mol_type = other DNA
ctggccggcctcggggcgcgtggccgtgctcccgcgcagctctcggaggcaccgcgcgagtgctggaggaatgtcggaggagcgggatgggcccccgcggagccgccaccggcacggccaggccagcatggtggaccacttacttccagtggacgagaacttctcgtcgccaaaatgcccagttgggtatctgggtgataggctggttggccggcgggcatatcacatgctgccctcacccgtctctgaagatgacagcgatgcctccagcccctgctcctgttccagtcccgactctcaagccctctgctcctgctatggtggaggcctgggcaccgagagccaggacagcatcttggacttcctattgtcccaggccacgctgggcagtggcgggggcagcggcagtagcattggggccagcagtggccccgtggcctgggggccctggcgaagggcagcggcccctgtgaagggggagcatttctgcttgcccgagtttcctttgggtgatcctgatgacgtcccacggcccttccagcctaccctggaggagattgaagagtttctggaggagaacatggagcctggagtcaaggaggtccctgagggcaacagcaaggacttggatgcctgcagccagctctcagctgggccacacaagagccacctccatcctgggtccagcgggagagagcgctgttcccctccaccaggtggtgccagtgcaggaggtgcccagggcccaggtgggggccccacgcctgatggccccatcccagtgttgctgcagatccagcccgtgcctgtgaagcaggaatcgggcacagggcctgcctcccctgggcaagccccagagaatgtcaaggttgcccagctcctggtcaacatccaggggcagaccttcgcactcgtgccccaggtggtaccctcctccaacttgaacctgccctccaagtttgtgcgcattgcccctgtgcccattgccgccaagcctgttggatcgggacccctggggcctggccctgccggtctcctcatgggccagaagttccccaagaacccagccgcagaactcatcaaaatgcacaaatgtactttccctggctgcagcaagatgtacaccaaaagcagccacctcaaggcccacctgcgccggcacacgggtgagaagcccttcgcctgcacctggccaggctgcggctggaggttctcgcgctctgacgagctgtcgcggcacaggcgctcgcactcaggtgtgaagccgtaccagtgtcctgtgtgcgagaagaagttcgcgcggagcgaccacctctccaagcacatcaaggtgcaccgcttcccgcggagcagccgctccgtgcgctccgtgaactgaaagcgccctgaaccccagcctgtccgtcaccccggatccccaccccatccccatttttttaagcaataatttatttgcctcctccagagggacatggcaatgttaccagcccaccttctgaagcctgggaggtgtgaacccagggcccgccaaccgctgcctttctcgggagtacttagagcctcgaacccgcgtccctgggggctgggccccaggcgcacggggctggaggcaggccttcgtgccttcgtgccttcgtgccttcccgcggtggccaggcctctgctgcagccgctggttgcaggcagagttttggggacctggcccttctcccactgggctcccccatcctgggccaaggccagaactttagtgctaggggaagatgaaatgtgcagttttgaaatgttgggtttccagagagagtcatgctggaggagaaggaagtaggccagaagtccagggctgcactgtggtgtgagggtggctttgtctaagatgcctgctcagcatgatcaccagagggtgtgggcaggtccctggagccgggg

SEQ ID NO: 1051 - DNA, 1819 bp, synthetic construct
  misc_feature 1..1819: note = Synthetic
  source 1..1819: mol_type = other DNA
aagcttgataaacacccagcctgccctggtcactgagcagggacaaaggttcacagaggtggccccgtcacagctggacactattgactctccttggcaccagacctagcatgtccttggcttcagaggatgcagctttcccttctcctctctatcaaagttctctgagcccctgctgggcaccagcggccagtccaggcactggggacgcagcagagacatggagtgcactgtctcagggggagacaggcattagctgaaccttcgcaaggcgccgccaccggcacggccaggccagcatggtggaccacttacttccagtggacgagaacttctcgtcgccaaaatgcccagttgggtatctgggtgataggctggttggccggcgggcatatcacatgctgccctcacccgtctctgaagatgacagcgatgcctccagcccctgctcctgttccagtcccgactctcaagccctctgctcctgctatggtggaggcctgggcaccgagagccaggacagcatcttggacttcctattgtcccaggccacgctgggcagtggcgggggcagcggcagtagcattggggccagcagtggccccgtggcctgggggccctggcgaagggcagcggcccctgtgaagggggagcatttctgcttgcccgagtttcctttgggtgatcctgatgacgtcccacggcccttccagcctaccctggaggagattgaagagtttctggaggagaacatggagcctggagtcaaggaggtccctgagggcaacagcaaggacttggatgcctgcagccagctctcagctgggccacacaagagccacctccatcctgggtccagcgggagagagcgctgttcccctccaccaggtggtgccagtgcaggaggtgcccagggcccaggtgggggccccacgcctgatggccccatcccagtgttgctgcagatccagcccgtgcctgtgaagcaggaatcgggcacagggcctgcctcccctgggcaagccccagagaatgtcaaggttgcccagctcctggtcaacatccaggggcagaccttcgcactcgtgccccaggtggtaccctcctccaacttgaacctgccctccaagtttgtgcgcattgcccctgtgcccattgccgccaagcctgttggatcgggacccctggggcctggccctgccggtctcctcatgggccagaagttccccaagaacccagccgcagaactcatcaaaatgcacaaatgtactttccctggctgcagcaagatgtacaccaaaagcagccacctcaaggcccacctgcgccggcacacgggtgagaagcccttcgcctgcacctggccaggctgcggctggaggttctcgcgctctgacgagctgtcgcggcacaggcgctcgcactcaggtgtgaagccgtaccagtgtcctgtgtgcgagaagaagttcgcgcggagcgaccacctctccaagcacatcaaggtgcaccgcttcccgcggagcagccgctccgtgcgctccgtgaactgaaagcgccctgaaccccagcctgtccgtcaccccggatccccaccccatccccatttttttaagcaataatttatttgcctcctccagagggacatggcaatgttaccagcccaccttctgaagcctgggaggtgtgaacccagggcccgccaaccgctgcctttctcgggagtacttagagcctcgaacccgcgtccctgggggctgggccccaggcgcacggggctggaggcaggccttcgtgccttcgtgccttcgtgccttcccgc

SEQ ID NO: 1052 - DNA, 32306 bp, Homo sapiens
  source 1..32306: mol_type = genomic DNA
gaagttccgttggggaagatggcggcggcctcgagcacccttctcttcttgccgccggggacttcagattgatccttcccgggaagagtagggactgctggtgccctgcgtcccgggatcccgagccaacttgtttcctccgttagtggtggggaagggcttatccttttgtggcggatctagcttctcctcgccttcaggatgaaagctcagggggaaaccgagggtaagtgactgtaggggaaaggagggggcgggacacaactgggggagccagtttgtgagaggaggttcttgcagatgtcccatgggggccactttaggggcatagagtccaggagagggaatgtgtattagttttagattgtcactataccctccttggtgattatagagcttcgactttagggcgatggggactctcaacttctgtgaagatttcatgctcgactagggcacttttggcctaaagtggtgggagacggggcaaatgaatacaaaatcagcttacatctcgttccagaagagacgcctgaataaatttagggctgtgtgtaaacgtactggagactattttggcatcaatgaaatgattaggtccttatatttattagcagccagcagttctctacaatgtcaagtgttcagatcctgtgccattgtgtatttttaaagtgcgctgaatttcgttcttttattgaccgaactacgaactgcagaaaaacaacttttctgtggaactttactaagattttctaaagttccacactccggctaagatgctgccttagcattttgggcatagttctgttgatacagtgaactgtgttattgtttatcttctccagtttcctctgagctttgcagattagagtccttgcctgattatttttgtatagtttctggcacgtaatagtcgctcaaaaagtgttggagcatcgaagtacagatatttatcagcaggtttctcaagaaaaacaaagagtgtgttttggagcagaggtcgaaaggtgaggccgggagcagtgactcacacctgtaatcccagcgctttgggaggctgcggctggaggatccctggagcccaggagttcgcgaccagcctgggcaacatactgaggccctgtctctacaaaaaaaataaaaaaattgccgggcactgtggctcacgcgtgtaatcccagcactttgggaggttgaggcgggtggatcacctgaggttgggagatcgagaccagcctgaccaacatggagaaaacccgtctctactagaaatacaaaattagccgggcgtggtggtgaatgcctgtaatcccagctacctgggaggctgaggtgggaggattgcttcaacccaggaggtggaggttgtggtgagccaagactgcgccattgcattcctacctgggctacaagagcgaaacttcgtctcaaaaaaaaaaaaaaaaaaaaaaggccgggtgtggtggctcactcctgtaatcccagcactttgggaggctgaggtgggcggatcacctgaggttaggagttcaagaccagactggctaacatggtgaaaccctttctctactaaaaatacaaaattagccaggcacagtggcatgcctgcaatcccagctacttggtaggctgaggcaggagaatcacccaaacccgggaggtggaggttgcagtgagccaagatagtgccactggactccagtctgggcaacaagagcaaaactccgtctcaaaaaaaaaaaaaaagaaaaaaaattgaaaataaataaaataaaaaattagctccaggtagtggctcaaggctgtaatcccagcaccttgggaggccgaagcgggcgaatcacttgagcccacaagttggagaccagcctagacaacctggcaaaagcctgtctctacaacagatacaaaaattagctaggcatggtggcacaagccagtagtcccagctacttgggaggctgaggtgggaggattacctgaatcctgtaggtcaaggctccagtgagccagaatcatgccactgcactgtaacctgggcgacagagcgagaccctgtttcaagggaaaattagctatagtctcagctactctgaaggctgagctgggaggatcacttgatcctggagcatgggaggttgaggctgcaataggccttgattgtgccagtgcactcaagctggggctacagagtgatactctgtcttaaaaaaaaaaaagaaaagaaagatgtactccttgggtgcaaggagacaacaagtgtaaaaatggaaacttcatgaagtaggagtttttgtctagtttgttcattgctgtctttttagcattttcatttatttatttatttatttgagacagagttttgctcttgttgcccaggttggagtgcagtggcgcaatctgggctcactgcaacctccgcctcctgggttcaagtgattctcctgcctcagccttccgagtagctgggattacaggcatgtaccaccaagcccggctaattttgtatttttagtagagatggggtttctccgtgttggtcaggctggtctcgaattcccaacctcaggtgatccacccgccttggcctcccaaagtgctgggattacaggcgtgagccactccgcccagccagcattttcatttattttttttcttttttttaaattttcctctctagcccagttcaataacttttttttttttttttttgacacaatgtctccctctgttgcctaggatggagtaagtggtgtgatcaaggctcatcactgaagcttcgacctcccaggctgaggtgatccttctgcctcagcctccagagtagctggggactgactacaggcacatgccaggaggcttggctaatttttttctttctttttttttttgagacagtgtttcgctctgttgcccatgctggagtgcaatagtgtgatctcggctcactgcaacctctgcctcctggattcaagcaattctcctcccttagcctcccaagtagctgggattacaggcatgcaccaccacatctggctaattttgtattttcggtagagacagggtttgacactccagcctggtcatcaagagtgaaacttagtctttaaaaaaaaaaaaaaaaaggtggatagataacagtccagtggtatggtattccttacatcagacccataacttgtgtgtcatcttgccattaaaaatgtcttctttggatgttttgaagtaaaatgattttggaaaatattttaactgaattcttactgtgatgaagtgtgggaatttattttgcaaggaaaactgtggatggtcttgatagaacagttactgataacgttttctgatttaaatcatagagtcagaaaagctgagtaagatgagttctctcctggaacggctccatgcaaaatttaaccaaaatagaccctggagtgaaaccattaagcttgtgcgtcaagtcatggtaaggattgtggtgaagtgggtaaagtgttttgcttagataattattcttaatacgctaagctccccatgtagatgtgttcatactatcttcataaaacatctgaatacatggtggtttcaactttaggagtctattgtatctatactacaggttgaatatcccttatatgaaatgcttgggaccggaagtgttttagattttggattgttttggattttggaatatttgcaaatatataatgagatatcttggggatgggacccaagtctaaacacataatttatttatgtttcataaacaccttatagatatagcctgaaggtaattttatacaacatatttaataatatatttaatacttttgtgtgtgaaactaagtttttttttgttttttttttttattgagacggagtttcactcttgttgcccaggctgggttgtaatagcccgatctcggctcactgcaacctctgcctcccaggttcaagtgattcttctgcctcagcctcccgaatagctgggattacaggcatgcgccaccacgcccagctaatttttatattatttgtagagacggggtttctccatgttggtcaggctggtcttgacctccagacctcaggtgatccacctgccttcgcctcccaaagtgctgggattacaggcgtgagccaccgcgtccagccgttttgactgcattttgactatgaccctgttatgtgaggtcaggtgtgaaatccttggtggcatcattgggaatgctaaaaaggttttggatttgggagcatttcagatttttgattttcagattaggtatgcccagcctgtactagtagaatttttgattcattcttttttttgagaccaggtcttatcatccaggctcaagtgcagtggcgcgatcatggctcactgcagcttcaacttcccaggctcaggtggttctcccacctcagcctcctagtatctggaacaacaggtgcatgtaaccatgtccagctagtttttttttttttttctttgagatggagtcttgctctgtggccaggctggagtgcaatggtgcgatctcggctcactgcaacctctgcctcttaggttcaagagattcccctgcgtcagcctcccgagtagccgggactacaggcacacgccaccacgcctggctaattttttgtattttagtagagatggggtttcaccatgttggtcaggatggtctccatctcctgacctcgtgatctgcctcccaaagtgctgggattacaggcgtgagccactgtgcccggctgcccagctagttttttatattttttgtagaaatcgtttttttttttttttttttgagatggagtgtcgctttgtcacccaggctggagtgcagtggtgcgatctcggctcactgcaagctttgcctcccgggttcatgccgttctcctgcctcagcctcccgagtagctgggactacaggcccctgccactattcccggctaactttttgtatttttagtagagacggggtttcaccgtgttagccaggatggtctcgatctcctgacctcgtgatccacccgtctcggcctctcaaagtgctgggattacaggcgtagccactgcgcttagccagaaataggtttttactctgtggctcaggctggtctcaaacttgtgggctcaagtgatccacccactttggcctcccaaagtgttaggattacagtgtgagccaccgtgcctggcggattcattttttttttttttttttaaagatggaatctctgtctgtcacctaggctggagtgcagtggtgggatcttggctcactgcatcctccgcctcctgggttcaagcgattctcctgccccagcctcctgagtagctggtattacaggcatccgccaccatgcccagttaatttttgtatttttagtagagatggggtttcaccatgttagccaggctggtcttgaactcctgaccttgtgatccacctgcctcagcctcccaaagtgctgtgattacgggtgtgagcccctgtgcctggcccaggttgtcatttttattccttaaggcaaccaaattctagcttgaaatatgttctgtaaatgatactgtcattagagagacattgtgagatagaaggattccaggtggctaataaggccctctctttgggtaccactctcttggtttggtcaccatgactttgcttgtctacttttcagttttgcagattcagaaacctaattttattggtacatcaagattttatagagttttcatggctgggcgtggtggttcacatctgtaatcccagcactttgggaggctgaggcgggtcgatcacctgaggtcaggagttcgagaccaggctgaccaacaaggtaaaaccctgtctctactaaaaagacaaaattagctgggcatagtggcaggcgcctgtagtcccagctactcgggaggctgagacagcagaaccgcttgaacccgggaggtggaggttgcagtgagccaagatcatgctactgcactccagtctgggcatcggagcgagactccatctcaaaaaaaaaaaaagagttttcaacaactgacatactgtatgcttatttattaatttatgacaaaacatttagttttccagttttcataatactggtattcattgaccagagcacctcttctcctgtcaagaatcaagagatttcagattattaataaattactttgttttgtaagggagaattagagcagtgagatagatttatttgcaacatggaaaagcctggaaaactatccttataccagaaaactgttcacgtttttagggactggaatgtttttcagagagaaacttcttcactggatagggttaggaaaactaggctaagtttttttttgtttgtttgtttgttttgttttgtttgagatggagtctcactctgtcaccaaggttggagtgcaatggtgtggtcttggctcactgcaacctctgcatccccgggtcaagcgattctcctgcctcagcctcctgagtagctgggactacaggcgcgtaccaccacacctggctaatttttgtatttttagtagagatggggtttcactatgttggccaggctggtctcgaactcctgacctcatgatctgctcgccttggcctcccaaagtgctgggattacaggcgtgagccactgcaaccggcctcaaactaggctaagtttttgttctttggaagtcccttttctggactacatgttctgtttcttttctttttctttttttttttgagacagagtctctctctgtcgccaggctggagtgcagtggtgtgatctcggctcactgcaacctccgcctcctgggttcaagtgattctcctgcctcagcctgctgagtagctgggactataggcgtgcaccaccacgcccagataatttttgtatttttagtagagacggggtttcaccattttggccaggatggtctcagtctcttgacctcgtgatccacccgccttgacctcccaaagtgctgggattacaggtgtgagccaccgcacccagcctatatgttctgttttttagagtcaatctcattttcttaaaatttggttgtgtttctcagattacatgcaaatcaccttgttaaatttgtacactaccaaatctcctgagccatcttatttaactgtttatatcttagcatgtggtcacttccacaggcggcagatctcatgtattacattttgattcttcctaatatttctctaaaggtttttttgttttagatgtggaaatacaacgttttcttttttgtttttgactaaatagaaacaggatctctctatcttgccttggctggtctcgaactcctggactcaagtgattattcagctttggcctctcagtgtgctagaattacaggcatgagccacgtgcctggctgaggaatacctttttctacactcatatatatggattttgcatggatggacagagtaacacttgtagaccagtgttactctatatagtctacaaaatctatagactatattgagtctatagactgtcctgcaatattactactaggataatgtgtatgtttacctaaaacactgttggcctggttaattttcacctcaaatgttttcccacttgacacaggagaagagggttgtgatgagttctggagggcatcaacatttggtcagctgtttggagacattgcagaaggctctcaaaggtttgtgaacacttttgaaatatgctgatttcacaaaacccccagttcaagaaggaccattttatacttaaactagaagtaaaaaattgaggtaggtcaactttatgtattagatattgctcttgcattcatttatggagttggaatgatctttttgctaaagtttgaaacatttatttttgatcctgttttggaggctgatagagatttaaaagataaatgatgaagggtaatataagatacctggggaggctgggtgcggtggctcgctcctgtaatcccagcactttgggaggctgaggtgggcggatcacaaggtcaggagtttgagaccagcctggccaacatggtgaaaccctgtctctactaaaaatacaaaaattagctggacgtggtggcgggcacctataatcccagcttctcgggaggctgaggcaggagaacagtgtgacctggggaggcggaggttgcagtgagccaaaatcacgccattacactccagcctgggcaacagggcaagacttgtctcaaaaaaaaaaaaaaaaaaaaaaaagatacctgggaaaagttttttttcccttcacatttatttctgattaatctcgataagaagatggactttttttttttttttttttttttttgagatggagtttcactcttgttgctctggctggagtgcagtggtggaatctcggctcaccacaacctctgcctcctgggttcaagcgattctcctgcctcagcctcccaagtagctgggattacaggcatgtgccaccatgcccgggtaattttatatttttagtagagacagggttttccatgttggtcaggctggtctcgatctcttgacctcaggtgatctgcccaccttggcctcccaaagttctgggatcacaggcgcgagccacagcaactcgcgaagtttttttttttttttttttttttccgagacggtgtctcactctgtcacccaggctggagtgcagtggcacaatcttggctcactgcaacctccacctcctgggttcaagcgattctcctggctcagcctcccaagcagctgggactacaggcgcgtcccaccacgcctggctaatgttttgtatttttagtagagatggggtttcaccgtgttagccaggatagtatagatctcctgacctcgtgatccacccgcctcggcctcccaaattgctgggattacaggcgtgagctaccatgcctgtccagaagatggacattttaactctaaaaagatttttacggtgtttatggagcaaatttccaggaaagcaaatgtaaaatataagtcatgagcttgattattcatgcttataatgactaattctatttttggggaataatgaaagtaaaaacagattttactgtgatccaccagaaatgaacctaattcagctgagggtttttttttttttttctggagacagtgtctcactctgtcgtccaggctggagtgcagtggcacgatctctgctcactgcaacctccgtttcccggattcaagtgattgttctgcctcagcctcctgagtaactgggattacaggcgcccattaccatgctcagctaatttttggatttttagtagagatggggtttcaccatgttggccagggtggtcttggactcctgacctcaggtgatctgcctgccttggcctcccaaagtgttgggattacaggcgtgagccactttgcccagtctcagctgagtattatcttctttacctttttttgttttctttttctttgagacagagtgtcgctgtgtcacccaggctggagtgcagtggcacgatctctgctcactgcaaccactgcgcccccaccgggttcaagagattctcttgcctcagcctcccgagagggtgggattataggcgcgcaccaccacacctggctaatttttgtatttttattagagacagggtttcaccacgttggtcaggctggtcttgaacccctgaccttgtgatccgcatgcctcggtctccgaaagtgttaggattacaggcgtcagccaccgcacgaggcctttttttctgttttaattgtggtaaaatataggtaacaaaatttaccattttctttgtttctaagtgtatagttcagtagcgttaagtacattcatattattgtataatcatcaccactgtccatctgtaaaacttcactcatcttcccaagcttacattctgtaatgtcccattcccgccttcccccagtccctggcagccaccattctgcttcctgtctttatgaatttgactactctgtatacctgatataagtggaatcatatatttgtccttttgtgactggcttatttcactaaacgtaatgtcttcaaggttcatctattttgaagcatttattagaatttctttcttttttaaggttgaaaaatactcctctttatgtatatacatttcatttatccattcatctgctagtggacacttggattgttttaaccttttgactgttgtgattaatggtgttgttaatgttgagttttttttaatgttagttttaatgttaatcttccttattctatcattagcagataaatgtgtcttaagttaaaggcagtttgtcccacataaggagtaatgaaaacaggagaggagaaaggttcggtaatttttcaaatagatcttttttttttgacctttagtactgcataggccacagctaaccctaatcagtgaactttatgtaaattacaagcatttgaactactgaatatgtttacggttttggaaggatgaatctttctgtcttaaaagaatatcatttaagtcatttggagcattctttgtgactccttttttcatccttttatagtaacatctttaccagcaatgactgatcgtttggagtccatagcaagacagaatgggtaagtagtctttctgtaggcagaaatgtttaacttagtgttaactttgggtggctttatttatgtgtcttctattaatttttgttttgatttgttcctgctagactgggctctcatctcagtgccagtggcactgaatgttacatcacgtcagatatgttctatgtggaagtgcagttagatcctgcaggacagctttgtgatgtaaaagtggctcaccatggggagaatcctgtggtatgtgttgttgatatttcactggaatctgtggggtttacttagggacattaattttaaaattaattgttggggtttaaatagcttgggtttaggtttttccatgagccactgtagagatgatgtgatgggctacaaaatcaacagctatagaatgggatttagaaaatatgggtcccatctctgacatcatccaaaggctttaacaagtggaaacaccataggaacccttttccctttccttccttccttccttcctttctttcttttctttcttttttctttctttctttcttgcttgcttgcttgctttctttttcttttctttcttttctttctttctctttctctctttctttctttctttccttccttccttccttccttccttccttccttctttctttctttctttctttccttctttccttctttttctttttttttttccctgggacagagtctcgttctgtcgcctggagtgcagtggcatgatcttggctcactgtaatctctgcctcctggattcaagcaattctcctgcctcagcctcccaagtagctgggattacaggtgtgtgccaccatgcctggctaatttttgtatttttagtagagacggggtttccctatgttggccaggctggtctccagctcctgacctcaagtgatccacctgcctcagcctcccaaagtgttgggattacaggcataagccactgcaccggcaggaacccttttcatttcatatcaacaaacatgagccacgattgaacaataggtgctggggatacagaaataaatgactcagggttactaccttcaaagagattataatcaagaacagatgatctgaaaaattatgtaatagagatgaatgtaaaatctgtgtaaccagataatttgatatgaattccatgtatggcattagagttcctaatgttttaaacaagctactgaaagtagattcttttaaaaactatttcatatgctttgactttaaatttctcaccctaatcctgtggttcaccaagtaggaagaagatgctttttaatattttaatatgaggaccatctgtagttttaatggttttgttgtaaaacatgtgctatagaaaaagagaaaggcttttgatatcttcaaagttgctaaagtagttttaatgttttaacataattttctttgatttcagagctgtccggagcttgtacagcagctaaggtgagcaaatacgatttatattccttgatattgacagacagtgctgttctttacagctggcttttaagactggtcagaagttattctcctcaggaacaagtttattttcttgggcaaagatttttaagagtctatacttaatcacgtcctgaattgacatagcatagcttttcaccctactctatcccagggtttttttgttttcgtttttgttttgagatggagtcttgctctattgcccaggctggagtgcagtggcgcgatctcagctcactgcaacctctgcctcctgggttcaagcgattttcctgcctcagcctccagagcggctgggactgcatgtgtgtgccaccatgcccagctaatttttgtatttttaatagagactaggtggctgggtgcggtggctcacgcctgtaatcccagcactttgggaggctgaggcaggtggatccatgaggtcaggagttcaagaccagactggccaagatggtgaaaccccatctctattaaaaatataaaatttaggctgacacctgtaatcccaggactttgggaggctgaggcgggtggatcatgaggtcaggagatcaagaccatcctggctaacacggtgaaaccccatctctactaaaaaaagaaaaaatacaaaaaattaactgggtgtggtggcaggcatctgtggttccagctactagggaggctgaggcaggagaatggcgtgaacctgggagcggagcttgcagtaagctgagatctcgccactgcactccagcctgggcgacagagcaagacgccgtctcaaaaaaaaaaaaaaaaaaaaaaaattagccaggcatggtggtgggtacctgtaatcccagctactcgggaggctgaggcagaaaattgcttgaacccaggaggcggaggttgtagtgtgctgagatcgtgccactgcactccagcctgggtgacagagcaagactccatctcagaaaaaaaaaaaaaatagagacgaggtttcgccatgtgggccaggctgatcttgaactcctgacctcacatctcccaaagtgctgggattacagttgtgagccaccatgctggacccttttcttttcttttctgtttttttttgagacggagttttgttcttgttacctagtctggagtataatggtgcggtctcggctcactgagcacctggccccttttctgtttttttatttttatttttatttttttggtgagacggagatttacttttgttgcccaggctggagtgcaatggtgtgatcttggctcaccgcatcctctgcctcctgggttcaagtgattctcctgcctcagcctcccgagtagctgggattacaggcatgtgctaccacgccctgctaattttgtattttcagtagagacggggtttcaccgtgttgcccaggctgatctcaaactcctgacctcaggtgatcctcctgccttggcctcccaaagtgctgggattataggcatgagccactgtgcccggcccctgtttttttaagttttaattttttttttcttattttgattcagattcccaacagaaagatatcccagggtctcttaaacttggtactaatgacaatttggattggaaaattctttgctcccgggtggcctggtgcattctattatgtttaatagcatccctggcctcttcattagttgctagtagtatctccttagttgttacaaccatgtcccctggggcacaaaatcacccctggttgggaattggtgatctaggtttaggaatttcatatagctgggggcggtggctcatgcctataatcccaacaatttgggaggtcgaagtgagcagatcacttgaggccaagagttcaagaccagcctagccagcctggcgaaaccctgtctctacaaaaaatacaaaaattgctgaatgtgaggccaggcgcgatggctcatgcctgtaatcccagcactttgggaagccgaggcaggcggatcacctgaagtcaggagttcgagaccagcctgaccaacacggagaaaccccgtctctactaaaaatacaaaattagccgtgcgtggtggcacatgcttgtaatctcagctacttgggaggctgaggcaagagaatcgcttgaacccgggaggcagaggttgtggtgagccaagatcatgccattacagtccagcctgggcaacaagaacaaaactctgtctcaaaaaaaaaaaaaaagtagctgagcatagtggctcacacgtgtaatcccagctactcaggaggctgaggcacaagatggcttgagcctgggaggtggaggttgcagtgagctgggatcacatcactgcattccagcctgggtgacggagtgagactgtctcaaaaaaaaaaataataaagaattatgtgtggaacaaaataaatagaaggtaatcattgaatcagtgaaggcttgataattgagtatgataccatgaaaataactttttcgctttgattttgggaaaaattgtttcatttagaaggtacatgtgtgttacagtaaaagtgctaggcttgaagacagtcgcttttagcagatagtggattttttcacttttcttttaattgagtggaaatttctgtacttaaatttaaactcagagttaagacttttggggaatttaaggaagttattacatacactttgttttgagcattgcgaagttctcaggcaccacatgaggatgtcttagagtgttcacattgaggaaataagttgtgtatgtgtgtgtgcaaaagcttttttttttttttttttcttttttttgagttggagtcttgctctgtcgcccaggctggagtgcagtggtgtgctctctgctcactgcaagctccgcctcctgggttcatgccattctcctgcctcagcctcccgagtagctgggactacaggcacctgccaccatgcccggataatttttgtatttttagtagagacgaggtttcatcgtgttagccaggatggtttcgatctcctgacctcgtgatctgcccgcctcggcctcccaaagtgctgggattacaggtgtgagccaccgcacccggccttttttttcgagatggtgtgtcactctgttgctcaggctggagtacagtggcgcaatctcggctcactgcaacctccccctcccgggttcaagcgattttcctgccttagcctcctgagtagctgggattatgggtacctgccattatgcccggctaatttttgtagtatccaggcatggtgaaaccttatgtctactaaaaatacaaaaaattagccgggtgtggtggtgctcgtctgtaattccagctacacaggaggctgaggctggagaattgcgtgaactcaggaggtggaagttgtagtgagctgagatcgtgccatcgccatcggactccagcctggacgacagagtgagactctgtctcaaaaaagaaaaggagaaaaaaagaaataatgttgacttttacctgatattaccatttagtatagatggtaatattaagttaaagaatatattttgctgctactcgtttctttttgctgtcttaatagcactgttgactgtaagtgctcagtaaatgctcacagaatgtctgctcaagtgtctgacattgtcatggcagtttagctttccagagagctttttttttcaagtttgaaaaaagatatcaagagttagaattgtggagatgtattggattcctaaacctatccacaaaagcccatttgtccgacaatcgaagcctgaatattgggtcctagaaagccagaggtcacggtagtagtttatgttttctagggtagatctggtcgtagcaatattttctaatgggtattttgcctcgagagtacccactaccttttctctgggtctccatctctgtcctagtatttgttttccctctcatctttgctctcatgttgctgtatacccacaagtgttgtgtcttcccaatttattttctttttttgacacacagtcttgctctgttgcccaggctggagtgcagtggcgcgatctcggctcactgcaagctccgccttcttggttcatgctgttctcctgcctcagcctcctgagtagctgggactacaggtgcccgccaccacactcggctaatttttttttgtatttttaatagagatggggtttcaccatgctagccaggatggtctcgatctcctaacctcatgatccacccaccttggcctcccaaagtgctgggattacaggcgcgaggactgtgcctggcccttcctaatttattttcttcttattatctctgcaatcaaaagttttatttttgttgacatccaaattcagttacatatttggaggaaaggagctgggtgtggtggtgcacacctgttgttgaaggtgagaggttgaagtgagagcattgctgaagtcctggagttagagtctggcctgggcaacatcgggaaaccccgtctctacaaaaaaattaataaaaagggaaaagaaaggaaagttgttaatgattgatttaaatcaggtttcattgcttgggagctaataaaacacctggtaaagagattttgcccaccttccttttaactttcacactgcttattagcaccttctccagaaaaaatggaggagggagacaaaggaaaatattttcttttcttttgctgctttacattgatgctagaaaacttttgaggaaaatggttaaagctgattattaaaatcagttttatatagctgtgatttttggcactttgttgtaagattgagtagtaattttatgttttattttcctctctttcccctcttccctgaactccttatagggaaaaaaattttgatgaattttctaagcaccttaagggccttgttaatctgtataaccttccaggggacaagtaagtatttttaatatttttgcttttgtttgtaaaaatcagtataaatctataagccaccttatgcctagaaatttgccacctcttctgctgtttgtcactcctagtttctacttatactgcaatctgtagctcagcttccaacattgggcctttcaaagatatcttcaataggcagcacctgcattaatcgatcataatgctggaagacagaatataatctttgagatgtccaacattccaatttctaggctgaaaggaattagttgctgtggaactggctttaattctatttttaacctacctgggattctattaacgtatttggctttttaaaacagagataaaaataagctttgaagtgctaaaaataggctttaatagtagtgaagccagtcaaagtggcccatgcctctaatcccagtacattgggaggccaagacaggaagatttcttgagctcaggagatcaataccagcctgggcaacatagtgagaccctgtctctagcagaaagacaacagcaacagcttagatgggtggtgatgggtgcatgtagtcccagctacttcggaggctaaggtgggacgatcacttcaaactagtagtttgagggtgcagtgagcagtgattgcgtcactgtgctccagcctggttgacagagcgagatgctgtctcaaaaaaaaagaaaaaatatgtgtgtatatatatatatatatatagtaacaaaaaaaatttattttaaaaattaatgttttaggctgggcacagtggctcactcctttaatcctggccactttgggaggctgaggtgggtggaccacctgaggtccagtcaagaattaatgttttaaaatgttttttttttttctttttttttaaatacggattgtcgctctgtcacccaggctggagtgcagtggcatgacctcagctcactgcagcctccacctcccgggttcaagcagttctcctgcctcagccttccgagtagctgggtttacggctatgcgccaccacgcccggctaattattataattttttttgagatggactcttgctctgtcgcccaggctgcagtacagtggtgccatctcggctcactgcaacctccgcctcctgggttcaagcgattctcctgcctcagcctcccgagtagctgggattaaaggcgcccaccactgacctggctaagttttgcatttttagtagaggtggggtttcaccatcttggccaggctggtctcgaactcctgaccttgatccacccgccatggcctcccagagtgcttggattataggcgtgagacattgcgcccagccacctggctaatttttgtatttctagtagagacagggttttaccatgttggtcaggctggtctcaaactcctgacctcacgtgatctacccgcttcggcctcccaaagtgttgggattacaggcgtgagccaccgcgcctggccagttttttttttggtttttgtttttttttggagacagagtctcgctctgccaccaggctggaatgcaatggcatgatctcggttcactgcaacctccacctcccgggttcaagcaattctcttgccttagtctcccaagtagctgggactacaggcgcatgctgccacgcctggctaattttttttttttgtattttattagagacggggtttcaccgtgttgcccaggctggtctcaaactcctgagctcaggcaatctgccctcctcggcttcccaaattgctaggattataggcatgagccactgcgcctggccagtttttaaaaatatatatatatttttgccttcaatttagacttgctctttaggccttctatgtcactgtttgtgtctgtatgtatatatgtgtatttttcaactttttttttttttttttttgagatggaatcttgttctgtcacccaggctggagtgcagtggtatgatcttggctcactgcaacctcttcctctcgggttcaagcaattctcctgcctcacccttccgagcagctgggattacaggtgcctgccaccacgctcggctaatttttgtagttttagtagagatggggttttgccatgttggccaggccggtctcaaactcctgacctcaggtgatctgcccgcctcagcctcccaaggtgctgggattacaggctgagccaccccgcttggtcatatttttcaactattaactcatgttcttctcatctactctccagcaaactgaagactaaaatgtacttggctctccaatccttagaacaagatctttctaaaatggcaattatgtactggtaagactgctaaaaccttaattctacatgatcccttgagtttttctctggggagattagggtcctattttatacatctctattaagcctgtatgataatatgtcctttctcttccaaaatgatgattgtatttgaacttctgagtatcagtatcgctaagttgttggttaccataggttttatctcaagactcatcagacctggagtcccatctgagaaataatagtctaagtgtaatttttgttcaccatactacatactggtgtgtacttggaaataatccctttactttggaggtgaaatacatttgctatatgcccaattacaagacagaaccattatgatagtattataagactttgggctgggcgcggtggctcacgcctgtaatcccagcactttgggaggccgaggcgggcggatcacctgaggtcacgagttcgagaccagcctgcccaatatggtgaaaccccgtctctactaaaaatacaaaaaattagctgggcgtggtggcgggcgcctgtaatcccagctactcgggaggctgaggcaggagaatcactggaacctgggaagcggaggttgcggtgagctgagattgtaccactgcacttcagcctgggcgacaagagcgaaactccgtctcaaaaaaaaaaaaagacaagacttcggagaggtgaactcaatatcacagtgtgtaccaagaccatcagggattaaatataagcaaacatagatcacttgtcttacaggaaagcaactaatgctggtcccttggataagattcttcatggaagtgttggctatctcacaccaaggagtgggggtacgtgatcctattttgcttgtttagaaacatgtgtaatttaagttgagggtcattacttttcatttcacctttagtttgtttgtttatttttttgagacagagtctcactttgttgcccaggctggagtgcagtggcatgatctcggcttactgctccttccacctcctgggctcaagtgaatctcatgcctcagcctcctgagtagctgggattacaggtgtgcaccacaatagccagctaatttattctattgttggtagagacagggtttcactgttttggccaggctggtcctgaactcctcgcctcgactgatcggcctaccttggtctcccaaagtgctgggattacaggcatgagccactgcgcccagcctatttatttgttaatttttattctgttttttttttttttttttaagacggagtcttgctctgttgcccaggctggagtacagtggcgcgatctcagctcactgcaagctccgcctcccaggttcacgccattctcctgcctcagcctccagggtagctgggactacaggcgcccgccaccacgcctggctaatttttttgtattttttagtggagacggggtttcacagcgttagccaggatgatctcgatctcctgacctcgtgatctgcccgcctcagcctcccaaagtgctgggattacaggcatgagccactgcgcctggccaatttttattcttatgtatttgtttatttttcttgagacaggctctcaccaggctggagtgcagtggcacaatcttggatcactgtaacctctgcctcctgggttcaagggattctcctgcctcagcctcccgagtagctgggattacaggcatgtgccaccacacccgactaatttttgtatttttagtagagatggggtttcaccatgttggccaggctggtctcaaattcctgacttcaagtgatcctccctcctcggctgcccaaagtgctgggattacaaacaggtattagccactgcaccaatccctatttatttatttttgagacagggtcttgctgtgttgcccaggctggagtgcagtcgtgcaatcatgactcactccagcctcaacctcctgggcccaaataatccccctaactcagtttcctgagtagcttggactacaggtacaggataccatgcctggctaatttttgttgttttatagagacatggtcttactatgttgcctaggctggtcttgaactgggatcaagtgatcttcctgccactgcattgcaaagggttgggattataagcataagccactgcgcccggcctcatcttggggtttataaacatataagcagagggagaaaattgccagatatttgtgtattttgtgatgatttcttcctttttttttttttttttttttttttaggcatttaggcagagtcttgctctgtctcccaggctggagtgcagtggcgcgatcttggctcattgcaacctctgcatcctgggttccagcaattctcttgcctcagcctcccatgtagctgggattacaggcacgtgccaccgtgcccagctaatttttgtatttttaccagagacagggtttcaccatgttggccaggctggtctcgaactcctgaccctaggtgagctgcctgtctcggcctcccaaagtgctgggattataggcgtgagccactgcgcctgggctttttgcgatgatttctaagctgtcaatacctgtcctccccatttttgtttgttatctttttgagacagagccttgctatgtccctctggctgaagtacagtggcagaaacatagctcacttcagcccttaactcttgggcttaagtgatcttcccacctcagccccctgagtagctaggacttcagtcaagtgccaccatgcctgggtaactttaacaatttttttagagatgggggtctcactgtgttgcctaggctagagtgcagtggtgcagtcataactcactatagacttgaactcctggcttcaagtgatcctccagcctcagcctcccaaagtgttgggattataagcgtgagccagttcacctggcctttttttttttttaaatcaattgtgtgaaataaattgttagtcccggaatccatacttcatcttctgtcatatgtcttttttttttgagatggagtcttgctctgtcacccaggctggagtgcagtggcacgattttagctcactgcaacctccacctcctgggttcaagcaattctcctgtcacagcctcccgagtagttgggactacaggtgcgagccaccatgcctggctaattttttgtatttttagtagatacaaggtttcaccatgctggccaggctcgtcttgatctcctgacctcgtgatctgcccaccttggcctcccaaagtgctgggattacaggtgtgtgccaccacacccaagcgcctgtcatatttctttattttttatttttactttttgagacggggtcttgctctgccttccaggctggagtgcagtggcacaatcacggctcattgtatccttgacctcccaccttaacttcctgagtagctgggactacgggcactcaccagcatgccaggctaattattattattattatttttgagacggagtctccctctgttgccagggctggagtgcagtggcatgatctcagctcactgtaacctccgcttcctgggttcaagcgattcttctgcctcagcctcctgcatagctgggactacaggcgcgtgccaccatgcccagctagttttttgtatttttagtcaagatggggtttcaccatgttagtcaggatggtctcaatatcctgaccttgtgatccgcctgccttggcctcccaaagttgtgggattacaggcatgagccaccgcacctggccaattttttgtatttttagtagagatggggtttcaccatgttggccaggctggtcttgaacttctctcctcaggtgattcaccatctttacctcccaaagtgctaggattacaggcattagccatcgcgcccggcctattattattatttttagaggtggagtctgactgtgttgaccatgctagtctcaaactcctggactcaagtgatcctcttgccggagcctcccagagagccaggattacaggtgtgagtcaccacacctgccatatttcataagctgttttggagcatgactcttcatatatgttaaagtactttcttgaatatcggtttatataataaatgttaatgtttttctgtgtttgtaatttacctgataaagatacagttatgagttttattttttataggtcatttaatgaacctgaagtactatgtctctccttctgacctactggatgacaagactgcatctcccatcattttgcatgagaataatggtaagactttaattgtaaaggaattaaaggttttgttcggtgcccagcttgcctttaatttctggtttgctattctctaatgagtttgttgaccttaccatttgcaccttatacacacaacacctcacacacgtatatgtgtgttcacaagtacatacatatgtatatacacacatgcatatatacacacatacataataggagcttaataagtacttttgggctgggcacggtggctcacgcctgtaatcccagcactttgggaggctgaggtgggcagatcacgaggtcaggacttggagaccagcctgaccaacatggtgaaaccctgtctctactaaaaatacaaaaattacccaagcatggtggtacgcgcctgtaatcccagctactcaggaggctaaggcaagagaattgcttgaacccgggaggaggaggttgcagtgagtcaagattgcgtcactgcactccagtctgggtgacagagcgagactccatctcaaaaaaagaaaaaaagtacttttgaataaataagtaaatgagcaactcataagaagagatataaacgatctgacctgagataatcagcttactcattgtttaaaaagtgtagaaggatgggcctggtagtttatgcctgtagtcctagctacttgggaggtttgggcgggaggattgcttgagcccaggagtttgagactgtagcataccatgatcgtgcatgtaaatagtcatggtactccagcctgggcaacgtagtgagttactgatcaaaaaaaaagtgaagttttctaaattaaagaactatggtaatggacattattttctgtttgcccttgatacaagaaaagataaagagagatagactgccgggcgcggtggctcatgcctgtaatcccagcactttgggaggctgaggtgggcgaatcacctgaggtcaggagttcgagaccagcctgaccaacatggagaaaccctgtctctactaaaaatacaaaattagccaggcgtgatggcccatgcttgtaatcccagctactcaggaagctgaggcaggagaatcgcttgaacctgggaggcggaggttgcagtgaaccgagattgtgccattgcactccagcctgggcaacaagagcaaaactctgtctcaaaaaaaagtgaaatggactaatacctccttaggtccctttgtagcttcactcattgactccatccctttattgtttgtttgtttgtttgtttatttatttatttaagatggagtctcactctgtcacccaggctggagtgcagtagtgcgatctcagctcactgcaacctacacctcctgggttcaagtgattctcctgcctcagcctcccaagtagctgggactacaggcatgcaccaccacacccggctaattcttgtatttttagtagagatggggtttcactatgttggccaagctggtcttgaactccttacctgaagtgatccacctgtcttggcctccgaaagtgctaggattacaggtgcgagccttggcgtcaggctcctttattgttattataatttggcatgggggacggggtaggtctcactgtgttgcccaggctggcgtacagtgatttgatcacagctcactacagcccccgaagtcctgggctcaagccatcctcccgccttggcctcccaaagtgctaggattacaggtgtgagccagtgcaccagcctgtccttttattatgatcctacttaaatgcattctgaagaaaaaataagtaaatattgatactgaacccttcaaaaatgatgtttttggactgcattgtttcttgtgttttatttactgacaaaaattattggttgattagaaaggtaacttccaggatttctaattttttttttttttttccccagacagagtctcactctgtcgcccaggctggagtgcagtggtgcgatttcggctcactgcaacctccgccccccaggttcaagtgattctcctgcctcagcctcctgagtagctgggattacaggcgcctgtcaccacacctggctaatttttgtgtttttagtagagatgcggtttcaccgtcttctgcaggctggtcttgaacccctgaccttgtgatccacccgcctcagcctcccaaagtgctgggattacaggcatgagccatcacacctggcctgatttctaagttttataggaactacaggccgtgcctggtggttcatgcctgtaatttcagcactgtgggaggctgagatgggtggatcaactttaggccaggagtttgagaccagcctggccaacctgatgaaacccccatctctacaaaacatacaaaaaaattagccaggcatggtggtgcattcctgtaatgccatgtacgtgggaggctgaggcatgaaaatttcttgaacctgggaggtggagattgcagtgagtcgagatcacaccactgcattccagtctggacagagtgagactctgcctccaataaaaaaataaataaataggctgggcgcagtgattcacacctgtaatcccacctgtaatcctagtccttcgggaggccaagatgggcggatcatgaagtcaagagatcgagaccatcctgaccaacatggtgaaaccccatctctactaaaaatacaaaaaattagccgggcatggtgatgggcgcctgtagttccagctacttgggtggctgaggcaggagaatggtgtgaacccaggaggtggagcttgcagtgagctgagattgcgccactgcactccagcctgggtgacagagcaagactctgtctcaaaataaataaataaatacataaataaataaataagggaataacagcatctgataaattatagctgacaaatattgcaaaaattaacctcttaaaacatactgtgattcccatcatttgtattactttgaggaataccctttttctttcctatccccagtttctcgatctttgggcatgaatgcatcagtgacaattgaaggaacatctgctgtgtacaaactcccaattgcaccattaattatggggtcacatccagttgacaataaatggtaagttaaatataattttagagtagcaaagtcaatttttctcaaagcgcagtatgtaacaagttttaacctggctgttaccccacttgaatttctagaggttggccttttgttttatccattcattggtttctcttttgtttgatatctgagtgttcctctccaaagtcggctcgtagaacacattctctgcactgaaagggaaagaagagaactgtgctaattcctctggcttaatgagtgcccccttttatcttacgttcattagttacattggagtaataactggagaacatgcctcaggataaatgtttgattaaattctacagtgttaaccaatagcatgtctgggaattgggggtaggaagtttcacagagtgagcttttgagagtttgtacttatgtgtctgtgtgatacatacatgtttaagaataggtgtttgtggccaggcatggtggctcacgcctgtaatcccagcactttgggaggctgaggcaagtggaacacctgaggtcaggagttcaagaccagcctggccaacatggtgaaaccccatctctactaacaatacaaaaattagccgggcgtggtggcgggcacctgtagtcccagctactcacgaagctgagataggagaatcccttgaacccgggaggcagaggttgcagtgagccaagatcacgccattgcactctagcctgggcattaagagggaaaatctgtctcaaaaaaaaaaaaggtgtttgggtttttcatttttatatcaagtcagaatccaacccttccaccctcttttttttgaaggaccccttccttctcctcaatcaccagtgccaacagtgttgatcttcctgcctgtttcttcttgaaatttccccagccaatcccagtatctagagcatttgttcagaaactgcagaactgcacaggtgagttttgagcatcaggatctagtacttgttataaatgtgaaaaagaaacttcaaagtcaggttatcatgacgtctttcagtcttacatgcctcattgaagtattactggtaaagatgttatagtgctttgtactagtaaatgcttagtaagtactcttttgggtgaatgaatgtagatatcaaggggaaactgagctgtcagtgttttcatcttaacatgatcattatattgattcttgtttttccaggaattccattgtttgaaactcaaccaacttatgcacccctgtatgaactgatcactcagtttgagctatcaaaggaccctgaccccatacctttgaatcacaacatgagattttatgctgtaagtaaagccctagggagctagaatgttgtaggttatgtttggacccaagatcataatcttcctttatagcattattgaggtcagataagtttcttcaagactgctggatcatgtcctatttctttagtaaggcaggaaattacagaaatctcagaaatgggctgggcgcggtggctcacacctgtaatccccgcactttaggaggccaaggcaggcggatcgtgaggtcaggagttcgagaccagcctggccaacatagggaaaccctgtctctactaaaaatacaaaaaattagccgtgtgtggtggcgggtgcctgtaatcccagctactcgggaggctgagggaggagaatggcttgaatctgggaggcagaggttgcagtgagacaagattgtgccattgtgctccagcctgggtgacagagcgagactctgtctcaaaaaaaaaaaaaaaaaaaagaaatctcggaaatgtattgaagtaaaagggcatgagcttccattaggaaacaacaatgtacagttctttgttgaaattttgggtgattggccaggtgcagtggctcacacctgtaatcccaggaatttgggaggccaaggcgggtggtcactagagatcaggagtttgagaccagcctggataacatggtgaaaccccgtctctactaaaaatataaaaattagctgggtgtggtggaacatgcctgtaatcccagctacttgggaggctgaggcaggagaatcacttaacccgggaggcagaggttgcagtgagccaagattgcgccactgcactccagcctgggcaacaagagcgaaattccgtctcaaaaaaaaaaaaaaaaaaaaaaaacgaggctgggcgtggtgtttcacatgtctaatcccagcagcactttgggaggccgaggcaggtggatcacgaggtcaagagatcgagagcatcctggccaacagggtgaaaccccatctctactaaaaaaatacaaaaattagctgggtgtggtgtcatgcacctgtagtcccagctactcgggaggctgaggcaggagaattgcttgaacccgggagacgaaggttgcagtgagccaagatcgcaccactgcgcttcagcctggcaacagagcaagactccgtctcaaaaaaataaaaaagaaaaagaaattttgggtgatagacttttttttttttttttgagacggagtcttgctgtgtcgcccaggctggagtgcagtggtgagatctcagctcactgcaaactccacctcccgggttcatgccattctcctgcctcagcctcctgagtagctgggactacaggcgcctgccaccatgcctggctaattttttgtatttttagtagagacgggatttcaccatgttagccaggatggtctcgatctcctgacctcgtgatccgcccgcctcggcctcccaaagtgctaggattgcaggcgtgagccaccttgcctggcggggtgacagactcttaatggtattttgaacttttagaatatcataattaggtgttataaattcttactgtttaattctttcaagtgccatgagcttagaatctggaaagatcctgaaagtacttacagagaggaaaatgctggaagcagtaattaagaggctgggcacagtgactcacacctgtaatcccagcactttgggaggccaaggcaaggcagatcacttgagctcaggagttcaataccagcctgggcaacgtggcaaaatcctctcttttttatttttttattttttgagatggagtctagctagctctgttgccaggctggagtgcagtggcgcgatctcggctcactgcaacctccgcctcccaggttcaagtgattctcctgcctcagcctcctgagtagctgggactgtaggtgtgcaccaccatgcccagataatttttgtatttttagtagagacggggttttaccatgttggccagattggtctttatctcttgaccttgagatccaccctactccgcctcccaaagtgctgggattacaggcgcaagccaccttgcctgtccttttcttttcttttttcttttttttttttttgctcttggtgcccaggctggagtgcagtggcacgatctcggctgactgcaacctctgcctcccaggttcaagcgattcttctgcctcatcctccggcaaaatcctgtctctacaaaaaaaaaatacaaaaattaggctgatgtggccgggagcggtggctcacgcctgtaatcctagcactttgggaggccgaggcgggcagatcatgaggtcaggagatcgagaccatcctggccaacatggtgaaaccccgtcactactaaaaaacacaaaaaattagctgggtgtggtggcgggcgcctgtagtcccagctacttgggaggctgaggcaggagaatggcgtgaacccgggaggtggagcttgcagcgagcagagatcgtgccactgcactccagcctgagctacaagagcaagactctgtctcaaaaaaaaaaaaaaaaaaaaataggcacatgtggttgttcatgcctgtagtctcagctgctcgggaagctgaggggcttcatcctgggaggtagagattgcaatgagccaagattgcacaattgtactccatcctgggtaatgggagtgaaaccctgtctcaaaagtaataataataataataagggaacgttccaaaacctcatctggacttgtatttatctgaatcttttacaatagactaaagtagtggttaccaaattctggctgcattattattatataggtgttttattaaaaatagagaatttgcagccgggcgtggttgtttattcctgtaatcccagcactttgggaggcccaggtgggtggatcacgaagtcaggagatggagacaatcctggctaacacagtgaaacactgtctctactaaaaatacaaaaaaaattagccgggcgtggtggcgggtgcctatagtcgcagctactcaggaggctgaggcaggagaatggcatgaactcgggaggcggagcttgcagtgagccgagatcgcaccactgcactccagcctgggcaacagagggagactctgtctcaaaaaaaaaaaaaaaaaaaagagattttgcatttatggtttaggaacctctttaatacagatttctgaggtagtttttatgttagctaggttaggaaatcactagcatagtgcatttactaaaaagacatcttttcagcctaattagtaattgattgacatttataatatcagctgatgaaaacattcactgtggagacttttctgcacttttttgagtagtaggttttttcaggatactttgtggttggaatacaataggtaactaaatagcactcgttaactgttctttttgcccaggctcttcctggtcagcagcactgctatttcctcaacaaggatgctcctcttccagatggccgaagtctacagggaacccttgttagcaaaatcacctttcagcaccctggccgagttcctcttatcctaaatctgatcagacaccaagtggcctataacaccctcattggaagctgtgtcaaaagaactattctgaaagaaggtactgcctttcctttgatatgcttactggaagatggaaacttacttctccagtggttctttaattggtggcccatcagaatcacctgtagaacttaaaaaaagttttttttttttcatatttggcataaaaatcaagcaaattagctgcacgtggtggtgcacgactgtagtcccacctacttgggaggctgaggaaggagaatcgcttgaacccgggaggcgggggttgcagtgagcttagatcatgccattgcactccagcctgggtgacagagcaagactctgtctcaaaaaaaaaaaaaaattcaaacatgtggagcttttaacactacagatgatggccaggtgtggtggctcacgcctgtaatcccagcactttgggaggccaaggtgggcaaatcacttgagcccatgatttgagatcggtctgaggaacatggcaaaaccccatctctagaaaaaagtagccagttgtggtggtgtgcgcctgtggtcccagctactcgggatcctgaggcaggaggattgtcgcttgagcctgggaggcagagattgcagtgagctcagattgcaccactgcactccaacctgggtaacacagtaagaccctgaatcaaaaacaaaacaccaggctgagtgcagtggtttgtgcctgtaatcccagcactttgggaggccgaggtgggcagatcacaaggtcaagagattgagaccatcctggccaactagtgaaacccagtctctactaaaaatacaa

SEQ ID NO: 1053 - DNA, 32306 bp, Macaca fascicularis
  source 1..32306: mol_type = genomic DNA
gttggggaagatggcggcggcctcgagcacccttctcttcttgccgccggggacttcagactgatccttcccgcgaagagtaagggactgctggtaccctgcgtcctggaatcccgagccaacttgtttcccccgttagtggtggggaagggcttatccttttgtggcagatccagtctctcgccgccttcaggatgaaagctcagggggaaaccgagggtaagtgactgagggggaaaggagggggcgggacacaactgggggagccagtttgtgagagaaggttcttgcagatgtcccatgggggccacttgaggggcacagagtccgggagagggaatgtgtatgagttttagattgtcactataccctccttgatgactatagagcttcgactttggggtgatggggactctcaacttctgtgaagatttcatgctcggctagggcacttttggcctaaagtggtgcgagacggggctagtgaatacaaaaccagcttacatctccttccagaagagacgcctgaataaatttagggctgtgtgtaaacgtactggagactattttggcatgaatgaaatgattaattccttgtatttattagcagccagcggatccctacaatgtcaagtgttcagatcctgtactgttgtgtattttttttttgtttttgttttttttttttttttttttttttttttttttgagacggagtctcgctctgtcgcccaggctggagtgcagtggccggatctcagctcactgcaagctccgcctcctgggttcacgccattctcctgcctcagcctccccagtagctgggactacaggcgcccgccacctcgcccggctagttttttgtattttttttttagtagagacggggtttcaccgtgttagccaggatggtctcgatctcctgacctcgtgatccgcccgtctcggcctcccaaagtgctgggattacaggcttgagccaccgcgcccggcctgttgtgtatttttaaactgtgctgaatttaattcttttattgaccgaactaataactgcagaaaaacaactttcctggggaactttactaagattttctaaagttccacactccggcttagatgcttccttggcattttgggcatagttctgttgatacagtgagctgtgttattgtttgtttatctccagtttactctgagctttgcagattagggtccttgcctgattcatttttatatagtttctggaacgtaatagtcgctcaaaaaatcttggagcatcgaagtgcagatatttatcagcaggtttctcaagaaaaacaaggagtgtgttttggaggagaggtcgaaaggtgaggccccgcgggagcagtgactcacatctgtaatccctgcgctttgggaggctgaggctggaggatcccttgagcccaggagttcgagacctgcctgggcaacatagtgaggccctgtctctacaaaaaaatgaaaaattgccgggcgccgtggctcacgcctgtaatcccagcactttgggaagtcgaggcgggcggatcacctgaggttgggagattgagaccagcctgaccaacatggagaaaccctggctctactaaaaacacaaaattagctggctgtggtggcgtatgtctgtaatcccagctacttgggaggctgaggtgggaggatcacttgaacccaggaggtggaggttgtggtgagccaagattgtgccattgcactcctgcctgggcaacaagagggaaacttcctctcaaaaaaaaaaaaaaaaaaaaaattggctgggcgtggtggctcattcctgtaatcccagcattttgggagaccaaggtggcggatcacctgaggtcaggagttcaagaccagcctggccaacatggtgaaaccctgtctctactaaaaatacaaaattagcccggcatggtggcatgcctgcaatcccagctacttgagagactgaggcaggagaatcactcaaacccaggaggtggaggttgcagtgagccaaggtggtgccactggactccagtctgggcaacgagagcaaaactctgtctcaaaaatataaataaattaattaaaaataaataaataaataaaataaaaaataaaaaaaattagggccaggtagtgactcaaggatgtagtcccagcactttgggagaccgaagcaggcagatcacttgagctcacaagttggagaccagcctggacaacctggcaaaagcctgtctctacaacaaatataaaaattaactaggcatggtggcacaagccagtagtctcagctacttgggaggctgaggtgggaggattacctgaatcctgtaggtcaaggctccagtgagccagaattgtgccactgcactccaacctgggtgacagagcgagaccctgtttcaaggaaaaattagctatagccccagctactctgaaggctgagctgggaggatcacttgatcctggagcatgggaggtcgaggctacagtagaccttgattgtgccaatgcacttaagccggggctgcagagtgatgctctgtcttaaaaaaaaaaaaaaaaaagaaaaaatgtactcctcaggtgcaaggggagaagggtaaaaatggaaactttgtgaagtaggagtttttgtctggtttgttcactgctgtctttttagcaatttcatttattctttttctttttttaaaaaattttcctctctaacccagttcaataacttttttttgacacaatgtctccatctgttgctcaggatggagtaagtggtgtgatcaaggcccatctctgaagcttcgacctcccaggctaaggtgatccttctgcctcagcctccagagtagctggggactgactataggcacatgccaggaggcttggctaatttttttctttttctttttttttgagacagagttttgctcttgctaatgctggagtgcaatagtgtgatctcggctcactgcagcctttgccttctggattcaagctattctcctgccttagcctcccaagtagctgggattacaggcatgcaccaccataccaggctaattttgtattttcagtagagacagggtttggccgggtgcggtgtctcaggcctgtaatcccagcactttggtaggctgaggtgggtggatcatctgaggtcaggagttcgagagcaacttggccaacatggtgaaaccccgtctgtactaaaaatacaaaaattagctgggtgtggtggtacatgcctataattccagctactagggaggctgaggcaggggaattgcttgaactcgggaggcggaggttgcagtgagccaagattgcaccactgtactccagcctaggtgacagagcaaaactccatttcaaaaaaaaaaaaaaaaagtagagatagagtttcaccatgttgaccacggtggtctcaagctcttgacttaggtaatctgcctgcttcggctttttaaaatgctggggttacaggtgtgagccactgcgcttggcctgacaaatttttttttttttaaagtagtgacgagatcttgttatgttgcccaagctgtagttgaactccccagcttaagtattctcccatgttggcctcccaaagtgctagcgaggattacaggtgtgagccacagtgtctggcctccccagcacttttactagtgcttgaggtcgggtgtggtggctcacacctgtaatcccagcagtttgggaggccgagtggacggatcatctgaggtcgggagttcgagaccagcctgaccaatgtggtaaaaccccatctctactaaaaatacaaaattagcttggtgtagtggtgcgtgcctgtaatcccagctacttgggaggctgaggcaggagtactggttgaacctgggaggaggtagaggttgcagtgagccgagatcgcgccattgcattccagcctgtgcatcaagagtgaaacttcgtctcaaaaaaaaaaaagtttggatagaaaacagtccagctgtatggtattccttacatcagacctataatttgtgtgtcatcttgccattaaaaatgtcttctttttttttttttttttttttttgagactgagtctggctctgtcgcccaggctggagtgcagtggccggatctcagctcactgcaagctctgcctcccgggtttacgccattcttctgcctcagcctcccgagtagctgggaccacaggcgcccgccacttcgcccggctagttttttgtattttttttagtagacatggggtttcaccgtgttagccaggatggtctcgatctcctgacctcgtgatccgcccgtctcggcctcccaaagttctgggattacaggattgagccaccgcgcccggcctaaaaatgtcttctttggatattttgaagtaaaatgattttggaaaatattttaactgaattcttactgagatgaagtgtgggaatttattttgcaaggaaaactgtggatagtcttgatagaacagttactgatgacgttttctgatttgaatcgcagagtcggaaaagctgagtaagatgagttctctcctggaacggctccatgcaaaatttaaccaaaatagaccttggagtgaaaccattaagcttgtgcgtcaagtcatggtaaggattgtggtgaagtgggtaaagtgttttgcgtagataattattctttttttttttttttgagacggagtctcgctctgtcgcccaggctggagtgcagtggcgcgatctcggctcactgcaagctccgcctcccgggttcacgccattctcctgcctcagcctcccgagtagctgggactacaggcgcccacaaccgcgcccggctaattttttgtatttttagtagagacggggtttcaccgtggtctcgatctcctgaccttgtgatccgcccgcctcggcctcccaaagtgctgggattacaggcgtgagccaccgagcccggccgataattattcttaatacgctaagttcctcatgtaaatgtattcatactatcttcataaaacatctgaatacatggtggtttcaactttaggagtcttattgtatctatactacaggttgaatatcccttatctgaaatgcttgggcccagaagtgtttcagattttggattgttttgaattttggaatatttgcaaatacatagtgagatatcttgggggatgggacccaagtctaaacacagaatttatgtttcatacaccttatagatatagcctgaaggtaattttatactatatatatatattttttttttttttttgaggcggagtctcgctctgtcgcccaggctggagtgcagtggccagatctcagctcactgcaagctccacctcccgggtttacgccattctcctgcctcagcctccggagtagctgggactacaggcgcccgccacctcgcccggctagtttttttgtatttcttagtagagacggggtttcaccatgttagccaggatggtctcgatctcctgatctcatgatccgcccgtctcggcctcccaaagtgctgggattacaggcttgagccaccacgcccggcctatacaatatatttaataatatatttaatacttttgtgcatgaaacaaagtttttttattttttatttttttattttgagacggagtttcactcttgttgcccaggctggagtgtaatggaccgatcttggctcactacaacctctgcctcccaggttcaagtgattcttctgcctcagcctcctgaatagctgggattacaggcatgggccatcacgcctggctaatttttatgtttttagtagagatggggtttttccttgtcgatcaggctggtcttcaactcctgacctcaggtgatccacctgccttggcctcccaaagtgctgggattacaggtgtgagcaaccatgcccagccgttttgactgcattttgaccatgaccctgttatatgaggtcaggtgtgaaatctttgatggcatcattgtgaatgctaaaaaggttttggattttggagcattacagatttttgattttctaattaggtctgcccaacctgtactagaagagtttttgattcattcttttttttgagatcgggtcttactttgtcatctaggctcaagtgcagtggcatgatcatggctcactgtagctttgacttcccaggcttaggtggttctcccacctcagcctcccagtatctgggacaacaggtgcatgtaaccatgcctggctagttttttttttttttttttctttgagatggagtctctgtggccagtctggagtgcaatagtgtgatttcagctcaccgcaacctctgtctctcgggttctagtgattctcctgcttcaacctcccaagtagctaggactagaggtgcacgccaccatgcctggctaattttttgtattttagtagagatggggtttcaccgtgttggccaggatggtctccatctcctgacctcgtgatctgcctgccttggcctcccaaagtcctgggattacaggcgtgcgccactgtgcccggctgtacagctagttttttacatttttgtagaaataggttttttttttttctttttttttttttgagattgagtcttgctctgtccccccgggctggagtgcagtggtgtgatctcggctcactacaagttccgcctcctgggttcacaccattctcctgcctcggcctcctgagtagctggaactacaggtgcccgctgccacacccagctaattttttgtatttttagtacagacagagtttcagcgtgttagccaggatggtcttgatctcctgacctcgtaatctgctggtcttggcctctcaaagtgttaggattacaggcgtgagccactgctcccagtcagaaataggtttttaccatgtggcccaggctggtctcaaacttgtgggctcaagtgatccacccaccttggcctcccaaagtgttatgattacagtgtgagccaccatgcctggcggattaattttttttttttttttttaagatggagtctccatctgttgcccaggctggagtgcagtggcaggatcttggctcactgcatcctctgtctcctgggttcaagtgattctgtacagctactcaggaggctggggctcccgccaccatgcccagctaatttgtgtatttttagtggagatggggtttcaccgtgttagccagtctggtctcgaactcctgaccttgtgatccacccacttcagcctctcaaagtgctgtgattacaggtgtgagccactgcgcctggcccaagttgtcatttttattccttaaggcaaccaaattctagcttgaaatatgttctgtagaagatactgtcattagagagacattgtgagatagaaggattccaggtggctattaaggccctctgtttgggtacccactatcttggtttggtcaccatgactttccatgtctacttgtcagttttgcagattcagaaacctaattttattggtatgttaaggttttatagagttttcgtggccgggcgtggtggttcacacgtgtaatcccagcactttgggtggccgaggtgggtgaatcacctgaggtcaggaggtcgagaccagcctgaccaacaaggtgaaaccctgtctctactaaaaagacaaaattagcccgttgtggtggcaggtgcctgtagtcccagctactcaggaggctgagacaggagaattgcttgaacccaggaggtggaggttgcagtgagcggagatcacgctactgcactccagcctgggcatcagagcgagactccatctcataaaacaacaaaaaaagttttcaacaactgacatactatatgcttatttattaatttataacaaaacgtttagttttccagttttcataatactggtattcattgaccagagcacctcttctcctgtcaagaatcaagagatttcagattattaataaattactttgttttgtaagggagaattagagcagtgagatagatttatttgcaacatggaaaagcctggaaaactatccttataccagaaaattgttcacatttttagggaatggaatgtttttcagagggaaacttcttcactggatagcattaggaaaactgggctaagttttttgttctttggaagtcccttttctggactacatgttctgtgtcttttctgtttctttttttttttttttccaagacagattctcgctctgttgccaggctggagtgcagtggcacgatctcagctcactgcaacctctgcctcccaggttcaagcgattctcctgcttcagcctcttgagtagctggcactacaggcatgcgccaccacacccggataatttttgtatttttggtagagatggagtttcaccatgttgaccagaatggtctcgatctcttgacctcatgacctcatgatccacctgccttggcctcccaaagtgctaggattgcaggcgtgagccaccgcacccggcctacatgttctattttttagagtcaatctcattttcctaaaatttggttgtgtttctcagattacatgcaaatcaccttgttaaatttgtacactaccaaatctcctgagccatcttatttaactgtttatatcttagcatatagtcacttccacaggaggcagatctcatctattacattttgattcttcctaatatttctgtaaaggttttcttgttttagatgtggaaatatgtttttctttttcttttttgtttttaactaaatagaaacaggatctctctaccttgccttggctggtctcgaactcctggactcaagtgattattcagctttggcctcccagtgtgctagaattacaggcatgagcctgtgcctggctgaggaatacctttttctacactcatgtatatggatttttcttcctttggatggatggacagagtaacacttgtagatcagtgttactctatatagtctacaaagtctgtagcctatattgagtctatagactgtcctgcaatattactactaggataatgtgtatgtttacccaaaacactgttggcctggttaattttcacctcaaatgttttcccacttgacacaggagaagagggttgtgatgagttctggagggcatcaacatttggtcagctgtttggagacattgcagaaggctctcaaaggtttgtaaacgcttttgaaatatgctgatttcacaaaacccccagtttaagaaggaccattttatacttagacttgaagtataaattgaggtaggtctactttatatactagatattgctcttgcattcatttatggagttggaatgagctttttgctatagtttgaaacatttattttcgatcctgttttggaggatgatagagattaaaagataaatgatgaagggtaatataagatacctggggaggtcgggtgcggtggctcactcctgtaatcccagcactttgggaggctgaggcgggcggatcacaaggtcaggagtttgagaccagctttggccaacgtggtgaaaccccatctccactaaaaatacaaaaattagccgggcatgtggcgggagtcccagcctcctgagtagctgtatagaatcacgtttttagtatctactaaaaatactgtctctactaaaaatacaaaattagctgggcgtggtggtgggcacctataatcccagcttcttgggaggctgaggcaggagaatagtgtgaactggggagccggaggttgcaatgagccgaaatcacaccattgcagtccagcccaggcaacagggcgagactctgtctcaaataaaaaaaaaaaaaaaaagagatacctgggaaaagttttttttttccggtttttttttttttttttttttttgagacggagtcttgctgtgtcgcccaggctggagtgcagtggcacaatcttggctcactgtaagctccacctcctgggttcatgccattcttgtgcctcagcctctggagtagctgggactaccggcacccgccaccacgcccggctaatttttttctattttttagtagagatggggtttcaccgtgttagccaggacggtctcgatctcctgacctcgtgatccacccgcctcggcctcccaaagtgctgggattacaggcgtgagccaccacgcccggcaaagttttttttttcttcacatgtttttttctgattaatctcgataagaagatggacttttttttttttttttttgagacagagtttcactcttgttgccctggctggagtgcaatggtggaatctcagtttacgacaacctctgcctcctgggttcaagtgattcttctgcctcggcctcccaagtagctgggattacgggcatatgccatcatgcccggctaattttgtatttttagtagagacagggtttttcatgttggtcaggctggtcttgatctctcaacctcaggtgattcacccgccttggcctcccaaagtgctgggatcacaggtgtgagccactgcacctggcgacatttttttttgtttgtttgttttaagacacagtctcactctgtctcccaggctggagtgcagtggcacaatcttggctcactgcaacctccacttcctgggttcaagcgattctcctggctcagcctcccaagcagctgggactacaggtgcatcctaccatgcctggctaattttttgtatttttagtagagatggggtttcaccgcattagccaggatggtatcgatctcctgacctcgtgatccacctgcctcagcctcccaaattgctgggattacaggcatgagctaccatgcctggctagaagatggacattttactctaaaaagatttttacgatgtttatggagcaaatttccgggaaaataaatgtaaaatataagtcatgagcttgattattcatgcttataatgactaattatattttttgggaataatgaaagtaaaaacagattttactttgatccactggaaatgaacctaattcagctgaggtttttttttttttttttcttctttggagacggtgtctcactctgtcgcctaggctggagtgcagtggcgtgatctctgctcactacaacctccgtttcctgggttcaagtgattcttctgcctcagcctcttaagtaactgggattacaggtgcccattaccacgctcggctaatttctggatttttagtagagatggggttttgccatgttggccagggtggtcttggactcctgacttcaggtaatctgcctgccttggcctcccaaagtgttgggattacaggtgtgagctactttgcctggtctcaggagtgcaatggtggaatctcggctcaccacaacctctgcctcctgggttcaagtgatttttctgcctcagcctcccaagtagctgggattacaggcatatgccaccatgcctggctaattttgtatttttagtagagactgagtgttattttctttatctttttttttttctttttttttttttttttgagacagagtcgctgtgtcacccaggctggagtgcagtggcgccatctctgctcattgcaaccactgccccctgggttcaagcaattctcttgcctccgcctcttgagtagctgggattacaggtgtgcaccaccatgcccagctaatttttgtatttttattagagacagggtttcaccatgttggtcgaacccctgaccttgtgatccgcccgcctcggcctctgaaagtgctgggattacaggcgtcagccaccgtaccaggcctttttttctgttttaattgtggtaaaatatagataacgtaaaatttaccattttctctgtttctaagtatatagttcagtagcattaagtacattcatttattgtataatcatcaccactctcaatctgtaaaacttcactcatcttcccaagcttacattctgtaatgtctcattcccgccttcccccagtccctgacagccaccattctgcttcctttcttttttttttttttttttttttgagacagagtcttgctctgtcgcccaggctggggtgcagtggcccgatctcagctcactgcaagctccgcctcccgggtttagactattctcctgcctcagcctcccgagtagctgggactacaggcgcccgccacctcgcccggctagttttttgtatttttttagtagagacggggtttcaccgtgttagccaggatggtcttgatctcctgacctcgtgatctgcccgtctcggccccccaaagtgctgggattacaggcttgagccaccgcgcccggccttctgcttcctttcttttttttttttttttttttttttgagatggagtctcgctttgtcgcccaggctggagtgcagtggccggatctcagctcactgcaagctccgcctcctgggtttgcaccattctcctgcctcagcctcccgagtagctgggactacaggcgcccgccacctcgcccggctagttttttttttgtatttttttagtagagacggggtttcaccgtgttagccaggatggtctcgatctcctgacctcgtgatccgcccgtctcggcctcccaaagtgctgggattacaggcttgagccaccgcgcccggcccttctgcttcctttctttatgaatttgactactctgtatacctgatataagtggaatcataccatatttgtccttttgtgactggcttatttcacttaacataatgtcttcaaggttcatctattttgaagcatttattagaatttcttccttttttaaggttgaaaaatactcctctctacatatatacatttcgtttatccattcatccgctagtggacacttggattgttttaaccttttgactgttgtgattaatggtgttgttaatgttgagtatttgtttttatgttagttttaatgttaatcttccttattctatcattagcagataaatgtatcttaagttaaaggtagcttgtcccacataaggagtaatgaaaacaggagaggagaaaggtccagtaatttttctttttttttttttttttttttgagacggagtctcacgctgttgcccaggctggagtgcagtggcgcgatctcggctcactgcaagctccgcctcctgggttcatgccattctcctgcctcagcctcctgagtagctaggactacaggcgcccgccaccttgcccggctaattttttgtatttttagtagagacagggtttcactgtggtctcgatctcctgaccttgtgatccgcccgcctcggcctcccaaagtgctgggattacaggcttgagccaccgcgcccggccagtaatttttcaaatagatctttttttttgacctttagtactgcataggccacagctaacccttaccaataaactttatgcacattacaagcatttgaactactgaatatatttatggttttggaaggattaatctttctgtcttcaaagaataccatttaagttatttggagcattctttgtgacttccttttttcatcctcttatagtaacatctttaccagcaatgactgatcgtttggagtccatagcaagacagaatgggtaagtagtctttctgtaggcagaaacgtttaacttagtgttaactttgggtggctttatttatgtgtcttctattaatttttgttttgatttgttcctgctagactgggctctcatctcagtgccagtggcactgaatgttacatcacgtcagatatgttctatgtggaagtgcagttagatcctgcaggacagctttgtgatgtaaaagtggctcaccatggggagaatcctgtggtatgtgttgttgatatttcactggaatctgtggggtttatgtagggacattaattttaaaattaattggtggggtttaaagagcttgggtttaggttttttcatgagccactgtagagatgatgtgatgggctacaaaatcaacagctatagaatggaatttagaaaacacgggtcccatctctgacatcatccaaagactttgaccagtggaaacaccataggaaaccttttccttccttccttccttccttcttttcttttttcttttcttttcttttatgtcttcttcttttttttttttttttttttttgaggcagagtctcattctgttgtccaggctgtagtgcagtggcatgatctcggctcagtgtaatctccgcctcctggactcaagtgattctcctgcctcagcctcccaagtagctgggattataggtgtatgccaccacgcctggctaatttttgtatttttagtagagatggagtttctctatgttggccaggctgttctctagctcctgacctcaagtgatccacccacctcagcctctcaaagtgttgggattataggcgtgagccactgcacccggcgggaacccttttcatttcatatcaacaaacgtgagccgcaattgaacaataggtgctggggatacagaaataaatgactcagggttcctaccctcaaagagattataatcaagaacagatgatctgaaaaattctgtaatagagatgaatgtaaaatgtgtgtaaccagacaatttgatatgaattccatgtatggcattagagttcttaatgttttaaacaagctactgaaagttgattcctttaaaaactatttcatatgctttgactttaaatttctcaccctaatcctatggttcaccaagtaggaagaaggtgctttttaatattttaatatgaggactatctgtagttttaacggttttgctgtaaaacatgtgctatagaaagagaaagacttttgatatcttcaaagttgctaaaggagttttaatgttttaacataatttctttgatttcagagctgtccggagcttgtacagcagctaaggtgagcaaataagatttatattccttgatattgacagacagtgctgttctttacagctaggttttaagactggtcagaagttattctcctcaggaacaagtttattttcttgggcaaagacttttaaggtctgtacttaatcacatcctgaattgacatagcacagcttttcaccctactctatcccagggcttttttttttttttttttttttttttgagatggagtcttgctctatcgcccagggtggagtgcagtagcacgatctcagctcactgcaacctctgcctcctgggttcaagcaattttcctgcctcagcctcctaagtggctgggactgcatatgtgtgccaccacgcctggctaatttttgtatttttaatagagacaaggtggctgggtgcggtggctcacacctgtaatcccagcactttggaaggctgaggcgggtggatccacgaggtcaagagttcaagaccagcctggccaagatggtgaaaccccatccctattaaaaatataaaatttaggatcacacctgtaatcccagcactttgggaggctgaggcgggtggatcatgaggtcaggagattgagatcatcctggctaacacggtgaaaccccatctctactaaaaaaaaaaaaattagctgagtgtggtggtgggcatctgtggtcccagctactcgggaggctgaggcaggagagtggcgtgaacctgggaggcagagcttgcagtgagccgagatctcaccactgcactccaacctgggtgacagagcaagacgccgtctcaaaaaaaaaaaaaaaaattagctgggcgtggtggccagtacctgtaatcccagctacccatgaggctgaggcagaaaattgcttgaacctgggaggcggaggttgcagtgagctgagatcgtgccactgcactccagcctgggtgacagagcaagactccatcttaaaaaaaaaaaaaaaaataagggccgggcgcagtggctcacacctgtaatctcagcactttgggaggccaaggcgggcaaatctaagaggtcaggagatcgagaccatcctggctaacacggtgaaaccccatctctactaaaaatacaaaaaattagccaggcgtggtggtgggcgcctgtagtcccagctactcgggaggctgaggcaggagaatggcgtgaacccaggaggcggagcttgcagtgagccgagatcacgccactgcattctagcccaggcacagagcaagactgtctcaaaaaaaacaacaacaaaaaaaatagagacgaggtttcgccatgttggccaggctgatctcaaactcctgacctcacatctcccaaagtgctgggattacagttgtgagccaccatgctaggcccttttctttttttttttgagacggagttttgttcttattacccaggctggagtataatggtgcagtctcggctcactgagcacctggccccttttctatttttttttcttgtttttttttttttgagatggagtctcgctctgtcacccaggctggagtgcagtggccagatctcagctcactgcaagctctgcctcccgggttcacgccattctcctgcctcagcctcccgagtagctgggactacaggcgcccgccacctcacctggctagttttttgtatttttagtagagacggggtttcaccatgttagccaggatggtcttgatctcctgacattgtgatccgcccgtctcggcctcccaaagtgctgggattacaggcttgagccactacgcccggcccccttttctattttttaaattttttttttttttttttttttggtgagatggagatttactcttgttgcccaggctggagtgcagtggtgcgatctcggctcaccacatcctccacctccgaggttcaagcgattctcctgcctcagcctcccgagtatctgggattacacgcatgtgccaccacgcctggctaattttgtatttttagtagagacggggtttcaccattttgcctgatctctaactcctgacctcagatgatctgcccgcctcagcctcccaaagtgctgggattacaggcgtgagccactgtgccaggcctattttttttttttttttgagacagagtctcgttctgtcacccaggatggagtgcagtggcatggtctcgactcactgcaagctccacctcccggattcatgccattttcctgcctcagcctcccaagtagctgggactataggcgcccaccaccacgcctggctaactttttctatttttagtagagacggggtttcacttgtgttagccaggatggtctgatctcctgaccttgtgatctgcccacctcggcctcccaaagtgctgggattataggcgtgaaccactgcgcctggcccctatttttttaatttttaatttttttttcttattttgcctcagtttcccaacagaaagatatcccagggtctcttaaacttggtactaatgacaatttggattggaaattctttgctcctgggcggcctggtttattctgttgtgtttaatagcatcccttgcctcttcattagttgccggtagttatctccttagttgtcacaaccatgtcccctggggtgcaaaatcacccctggttggaattgctgatctaggtttaggaattccatatagctgggggtggtggctcatgcctataatcccaacaatttgggaggttgaagtgggcagatcacttgaggccaggagttcaagaccatcctagctagcctggcgaaactctgtctctacaaaacatacaaaaattagcggagtgtgaagctgggcgcagtggctcatgcctgtaatcccagcactttgggaggctaaggcaggcggatcccagcctgaccaacatggagaaattccgtccctaaaaatactaaattagccgtgtgtggtggtgcatgcttgtaatcccagctacttgggaggctgaggcaggagaatcgcttgaacctgggaggcagaagttgtggtgagccaagatcatgccattacagtccagcctgggcaataagagcaaaactgtctcaaaaaagaaaaaaaaaaaaaagttagctgagcgtagtggctcacatatgtaatcccagctacttgggaggctgaggtagaaaatggcttgagcctgggaggtggagattgcagtgagctgggatcacatcactgcactccagcctgggtgatggagtgagactgtctcaaaaaaaaaaaaagaattgtgtgtggaacaaaataaatagtaagtaatcattgaatcagagaaggcttgataattgagtataccatgagaataactttttcgctttgattttgggaaaaattgtttcatttagaaggtatgcatgtgttacaggaaaagtgctaggcttgaaaacagtcacttttagcacatggtggattttttcacttttcttttaattgagtggaaatatctgtacttaaatttaaactcagaattaagacttttggggaatttaaggaagttattacataccctttgttttgagcatagcagagttctcaggtaccacatgaggatgtcttagagtgttcacattgagaaaataaggggtgtgtgtgtgtgtgtaaaagtgttttttttttcttttctttttttttgtttttgagacggagtctcgctctgtcgtccaagctggagtgcagtggcgcgatctctgctcactgcaagctccgcctcccgggttcacgccattctcctgcttcagcctcccgagtagctgggacttcaggtgcctgccacacgcccggctaattttttgtatttttagtagagatgggatttcatcatgttagccaggatggtctcgatctcctgacctcgtgatccacccgcctctgcatcccaaagtgctgggattacaggcgtgagccactgcacctggcctttttttctttttttgagatggtatctcactctgttgcccagtgcagtggcacgatcttggctcactgcagcctccacctcccgggttcgagcgattttcctgctttagcctcctgagtagctgggattacaggtacctgccattatgcccggctaatttttgtattatccgggtgtggtgaaaccttctctctactaaaaatacaaaaaattagctcagtgtggtggtgctcgtctgtaattccagctacacaggaggttgaggctggagaatctcaggaacttaggagggagaagttgcagtgagctgagatcgtgccatgccatcacactccagcctggtggacagagtgagactctgtctcaaaaaagaaaaaaaaaaaaaacaatgttgacttttacctgatatttagtcatttagtatagatggtaatattaaggtaaagaatatattttgctgctactcttgtttctttttactctcttaatagcactgtggactgtaagtgctcagtaaatgctcacagaatgtctgctcaagtgtctgaccttgtcatggcagtttagctttccagagaggtttttttttcaagtttgaaaaaagatatcaagagttagaattctggagatgtattggattcctaaacctatccacaaaaacccatttggctgagaatcaaagcatgaatatttggtcctagaaagccagaggtcatggtagtagtttattttttctggggtagatctggtcatagcaatattttctaatgggtagtttgcctccagggtacccactaccttttctctgagtctccatgtctgtcctagtatttattttccctctcatctttgctctcatgttgctgtatacccacaagtgttatgtcttcccaatttattttcgttcttttttttttttttttgagacagtcttgctctgtcccccaggctggggtgcagtggcgtgatcttggctcactacaagctccacctcccgggttcacgccattctcctgtctcagcctcctgagtagtagctgggactacaggtgcccgccatcacacccggctaatttttaaaaatatttttagtagagatggggtttcaccatgttagccaggatggtctcgatgttctgaccttgtgatccacccgcctcggcctcccaaagtgctgggattacaggcataagcccctgtgcctggcccttcctaatttattttcttctcattatctctgcaatcaaaagttttatttctgttgacatccaaattcaattacatatttggaggaaaggagctgggtgtggtggtgcacacctgtagtcccagccacatgagaggttgaagtgagagcattgcttaagtcctggaattagagtctggcctgggcaacatagggaaaccccatctctataaaaacattaataaaaagggaaaagagccgggcgcggtggctcacgcctgtaatcccagcactttgggaggccgaggcgggtggatcacgaggtcaggagatcaagaccatcctggctaacacggtgaaaccccgtctctactaaaaatacaaaaaactagccaggcgtggtggtgcgtgcctgtagtcccagctacttgggaggctgaggcaggagaatggcgtgaacccaggaggcagagcttgcagtgagccgagatggtgccactgcactccaacctgggcaacaaagtgagactctctcaaaaaaaaaaaaaaaaaaaaaggaaagttgttaataattgatttaaatcaggtttcattacttgggagctaataaaactacctggtagagaggttttgaccaccttccttttaactttcacactgtttattggtaccttctccagcaaaaatggagcagagagacaaaggaaaatattttcttttcttttgctacttttcgttgatgctagaaaacttttgaggaaaacagttaaagctgattgttaaaatcagttttatatagctgtgatttttggcactttgttgtaagatggagtagtaattttatgttgtattttcctctctttcccctctcccgtgaactccttatagggaaaaaaattttgatgaattttctaagcaccttaagggccttgttaatctgtataaccttccaggggacaagtaagtatttttaatatttttgcttttgtttggaaaaatcagtataaatctataagccaccttatgcctagaaatttgccaactcttctactatttgtcactcctagtttctacttacactgtaatctgtagctcagcttccaacgttaggcctctaaaagatatcttcaataggcagtgcctgcattaattgatcataatgctggaagacagaatattatctttgagatgtccaacattccaatttccaggctgaaaggaattagttgttgtggaactggctttaattctacttttaacctacctgggattctattaacctatttgggttttaaaaacagagatgaaaataagctttgaagtgctaaaaataggctttaatagtagtgaagccagtcaaagtggcccatgcctctaatcccagcacattgggaggccaagacagcaagatttcttgagctcagagatcaataccagccttggcaacatagtgagaccctgtctctagcagaaagacaacaacaacagcttagatgggtggtggtgagtgcctgtagtcccagctacttgggaggctaaggtgggacgatcacttcaaattagtagtttgagggtgcagtgagcagtgattgtgccactgtgctccagcccagtcgacagtgagatgctgtctcaaaaaaaaattatgtagtgacaaaaataattttattttaaaaattaatgttttaggctgggcacagtggcttacacctttaatcctggcactttgggaggctgaggtgggtggaccacctgaggtcaggtcaagaattaatgttttaatttttttttttttttaatacggagtgtcgctctgtcacccaggctggagtgcagtggcacaacctcagctcactgcagcctccgcctcctgggttcaagcagttctcctgcctcctccttctgagtagctgggattacaggtatgcaccactacacccggctaattttttttttttttttttgagacggaatcttgctttgtcgcccaggctgcagtgcagtggtgctatctcggctcactgcaactgcagcctcctgggttcaagtgattctcctgtctcagcctcctgagtagctgggattaaaggcgccggccaccgcacctggctaagttttgcatttttagtagaggcgggttgtttcaccatcttagccaggctggtctcgcactcctgacaccttgatccacccgccgtggcctcccagagtgctgggattacaggcgtgagtcactgcacccggccacctggctaatttttgtagttttagtagagaaggggttttaccatgttggtcaggctggtctcaaactcctgacctcatgtgatccacctgcctcggcctcccaaagtgctgggattacaggcatgagccaccgcacctgggcagttttttttttgttttttgagttttttttttttttttttgagatggagtcttgctctgccaccaggctggagtgcaatggcacaatcttggctcactgcaacctccgcctcccgggtttaagcaattctgcctcagcctcccaagtagctgggactatagatgcatgctgccacgcctggctaattttttttttttttttttttttttttttattagagacggggtttcaccgtgttgcccaggctggtctcaaactcctgagctcaggcaatctgcccacctcagcttcccacattgctaggattataggcgtgagccacgccctattagccacactcggctactttttgtatttttagtagagacggagtttcgccatgttggctaggctggtcttaaactcctgaccttgggtgatctgcccgcctcagcctcccaaagtgctgggattacaggcgtgagccacttcgcccggtcataattttcaactgttaactcatgttcttctcatctactctccagcaaactgaagactaaaatgtacttggctctccaatccttagaacaagatctttctaaaatggcaattatgtactggtaagacttgtaaaaccttaattctacacgatcccttgagtttttctccaaggagattagggtcctattttatacatctctattaagcttgtatgatatatgtcctttctcttctcaaatgatgattgtatttgaacttctgagtatcagtatcattaagttgttggttaccataggttttgtctcaagactcatcagactccatggagtcccatctgagaaataatagtctaagtgtaatttttgttcaccatactacatactggtgtgtacttggaaataatccctttactttggaggttaaatacacttgctatatgctcaattacaagacagaaccattatgatagtattataagactttgggctgggcgtggtggctcacgcctgtaatcccagcactttgggaggccgaggcgggcggattacctgaagtcacgagttcgagaccagcttgtccaacatggtgaaaccccgtctctactaaaaatacaaaaaattagccgggcgtggtggcgggcgcctgtaatcccagctactcgggaggctgaggcaggagaatcacttgaacctgggaagtggaggttgcagtgagctcagattgtgccactgcactccaacctgggcaacaagagcgaaactccgtctcaaaaaaaaaaaaaaagactttggagaggtgaactccatatcacagtgtgtaccaagaccatcaggcattaaatataagcaaacatagatcacttgtcttacaggaaagcaactaatgctggtcccttggataagattcttcatggaagtgttggctatctcacaccaaggagtgggggtatgtgatcctattttgcttgtttagaaacgtgtaatttaagttgagggtcattgcttttcatttcacctttagtttgtttgtttgtttattttatttttttgagacagagtctcactttgtcgcccaggctggaatgcagggccatgatctcagcttactgctccctccacctcctaggctcaagtgaatctcatgcctcagcctcctgagtagctgggattacaggtgtgcaccgcaatagccagctaatttattctagtgttggtagagacagggtttcactgtcttggccaggctggttctgaactcctcacctcaactgatcgacctaccttggtctcccaaagtgctgggattacaggcatgagccactgcatctagcccatttatttattaatttttattcttatgtatctgtttatttttcttttcttttttttttttttttgaggtggagtcttgctctgtcgcccaggctggagctcagtgaccggatctcggctcactgcaagctccgcctccggggtttacgccattctcctgcctcagcctcccaagtagctgggactacaggtgcctgccacctcgcctggctagttttttttttttgtatttttttagtagggacggggtttcaccgtgttagccagaatggtcttgatctcctgaccttgtgatctgcccgtctcggcctcccaaagtgctgggattacaggcttgagccaccgcgtccggcctgtttatttttcttgagacaggctctcaccaggctggagtgcagtggctgaattttggctcactgcaacctctgcctcccgggttcaagcgattcttgtgcctcagcctcccgagtagctgggattacaggcatgtgccaccacactcaactaatttttgtatttttagtagagatggggtttcaccatgttggccaggctggtctcaaattcctgacctcaaatgatcctccctcatcggctgcccaaagtgctgggattacaaacaggtattagccactgcactagtcctatttatttatttctgagacagggtcttgctctgttgcccaggctggagtgcagtcgtgcaatcatgactcactccagcctcaacctcctgggcccaaacaatcctcccaactcagtttcctgagtagctgggactacaggtgcaggataccatgcctggctaatttttattgttttatggaaacatggtgttactaagttgtctaggctggtcttgaactgggatcaagtgatcttcctgccactgcgttgcaaagggttgggattataggcgcctggcctcatgttgggtttataaacatataaagcagagggagaaagttaagatatttgtgtatttcgtgatgatttctttctttttttttttttttttttttttttgaggcagagtctcactctgtctcctaggctggagtacagtggtgcgatcttggctcattgcaacctctgcatcccgggttccagaaattctcctgcttcagcctcccatgtagctgggattacaggcacgtgcccctatgcctggctaatttttgtatttgaaccagagacggggtttcactgtgttggccaggctggtctcgaactccggaccctaggtgagctgcctgccttggcctcccaaagtgataggattataggcatgagccactgcgcctgaccttttcgtgatgatttctaagctgtcaatacctatccttcccatttttgtttgtttgttttgtttttgagacagagcctttctctgtccctctgactgaagtacaatggcaggaacatagctcacttcagcccttaactcttgggcttaagtgatcttcccaccttagccccgagtagctgggacttcagtcaagtgccaccatgccactttaacaattttttttagagatgggggtctcactatgttgcctaggctagagtgcagtggtgcagtcataactcactctagacttgaactcctggcttcaagtgatcctctggcctcagcctcccaaagtgttgggattataagtgtgagccagttcacctggcctttttttttttaaatcaattgtgtgaaataaattgttagtcccagaatccatacttaatcttctgtcatatgtcttttttttttttttttgagatggagtcttgctctgtcgcccaggctggagtgcagtagcttgatcttagctcactccaacctctacctccggggttcaagcaattcttctgttgcagcctcccaagtagctggtactacaggcgtgtgccaccatgcctggctagttttttgtgtttttagtagatatgcggtttcaccatgctggccgggctggtcttgatctcctgacctcgtgatctgcccacctcggcctcccaaagtgctggcattacaggcgtgtgccactccacccgggcgcctgtcatagttctttgttttttatttgtattttttcagacagggtcttgctttgccttccaggctggagtgcagtggcacgatcatggctcattgtatccttgacctcccaccttatcttcctgagtagctaggactacaggcactcaccagcaggccaggctaattattattattattattgttatttttgagatggagtgtcactctgttgccaaggctggagtgcagtggcgcgatctcagctcactgtaacctccgcctcctgggttcaagcgattctcctgcctcagcctctcatgtagctgggactacaggcgcatgccaccatgcccagctaattttttgtatttttagtcaagacggggtttcaccatgttagtcaggatggtcttgatgtcctgaccttgtaatcaacctgccttagcctcccaaagttgtgggattacaggcatgagccaccgcgcctggccaatgttttgtatttttagtagagacagggtttcatcatgttggccacgctggtcttgaacttcttacctcaggtgattcacctgcctcacctcccaaagtgctaggattacaggcattagccattgtgcccagcctattattattacttttagagatggagtctcactgtgttgcccatgctggtctcaaactcctggactcaagtgatcctcttgccacagcctcccaaagtgccaggattacaggtgtgagccaccatggctgccatatttcataagctgttttggagcttgactcttcatatatgttaaactactttcttgaatataggtttatataataaatgtttatgtttttctgtgtttgtaatttacctgataaagatacagttatgagttttctttttcataggtcatttaatgaacctcaagtactatgtctctccttctgacctgctggatgacaagactgcatctcccatcattttgcatgagaataatggtaagactttaattttaaaggaattaaagattttgttcggtgcccaggttgcctttaatttctggtttgctattctctaatgagtttgctgaccttaccatttgcaccttatacacacaacacctcacacacatatgtatacatcggttcacaagtacatacacacataggtatatacacaatacaaatatacacacatacatagtagaagcttagtaagtactttggggctgggcacagtggctcacgcctgtaatcccagcactttgggaggctgaggtgggcagatcacgaggtcaggagttcgagaccaatctgaccaacatggtgaaaccctgtctctactaaaaatacaaaaattgcttgggcatggtggcgcgtgcctgtaatcccaactactcaggagggtaaggcaggagaatcacttgaacccgggaggcggaggttgcggtgagccaagatcgtgccactgcactccagtctgggtgacagagtgagcctccatctcaaaaaaagaaagtattttgaataaataagtaaatgagtgagtcataagaagagatatcaaccatctgacctgagataatcagcttacttactgttttaaaagtaaagaaggatgggcatggtggtttatgcctgtagttctagctacttgggaggtttgggcaggaggattgcttgagcccaggagtttgagactgtagcataccatgatcgtgcctgtaaacagtcatggtactccagtctgggcaatgtagtgagttactgatcaaaaaaaaaaaagtgaagttagttttctaaattaaagaactatagtaatggacattattttctgtttgcccttaatacaagaaaagataaagagaaatagactgccgggcatggtggctcacgcctgtaatcccaccactttgggaggctgaggtgggcgaatcacctgaggttaggagtttgagaccagcctaaccaacatggagaaaccctgtctctactaaaaatacaaaattagccaggtgtggtggtgcatgcctgtaatcccagctactcaggaagctgaggcaggagtattgcttgaacccggaaggcggaggttgcaatgagccaagattgcaccattgcactccagcctgggcaacaagagcaaaactccatctcaaacagaaaaaaaaagtgaaatggactaatacctccttaggtccctttgtagcttccctcattgactccatccctttattgtttgtttgtttgtttatttatttatttaagatggagtctcactctgtcacccaggctggagtgcagtggtgtgatctcagctcactgcaacctacatctcctgtgttcaagcgattctcctgcctcagcctcccaagtagctgggactacaggcgtgcaccaccatacccagctaattcttgtatttttagtagagatggggttttactatgttgaccaagctggtcttgaactccttacctgaagtgatccacctgtcttggcctcccaaagtgctaggattacaggcgtgagcctcggtgtcaggctcctttattgttattataatttggcatgggggacagggtaggtctcactgtgttgcccaggctggagtacagtgatttgatcacagctcactgcagcccctgaagccctgggctcaagccatcctcctgcgttggcctcccagagtgctaggattacaggtgtgagccagtgcaccagcctgtccttttatgatcctacttaaatgcattctgaggaaaaaataagtaaatattgatactgagcccttcaaaaatgatgtttttggactgcattgtttttgtgttttatttactgacaaaaataattattggttggttagaaaggtaacttccaggatttctattttttttttttttccagacagagtctcactctgtcgcccaggctgcagtgtagtggcgtgatttcggctcactgcaaactccgccccctgggttcacgtgattctcctgcctcagcctcttgagtagctgggattacaggcgcctgtcactgcacctggctaatttttgtgtttttagtagagatgcggtttcaccatattctgcaggctggtcttgaacccctgaccttgtgatccatctgccttagcctcccaaagtgctgggattacaggcgtgagcaaccacgcctggcctgatttctaagttttataggaactacaggccatctcaaaaaaaaaaggccgggtgcggtgactcatgcctgtaatcccagcactttgggaggccgaggtgggtgaatcacgaggtcaggagatcgagaccatcctggctaatatggtgaaaccccgtctctactaaaaatgcaaaaaattagctgggcatggtgacaggcgcctgtagttccagctactcgggtgactgaggcaggagaatggtgtgaacccgggaggtggagcttgcagtgagccgagattgcgccgctgcactccagcctgggcaatagagcgagactctgtctcaaaaaaataaaataaaataaataagggaataacagcatctgataaattatggctgacaaatattgcaaaaattaaccttttaaaacatactgtgatccctgtcatttgtattactttgaggaatacgctttttctttcctatccccagtttctcgatctttgggcatgaatgcatcagtgacaattgaaggaacatctgctatgtacaaactcccaattgcaccattaattatggggtcgcatccagttgacaataaatggtaagttaaatataattttagactagcaaagtcaatttttctcaaagtgcagcatggaacaagttttaacctggctcttaccctacttgaatttctagaggttggccttttgttttatccattcattgatttctcttttgttcgatatctgagtgttcctctccaaagtctgctcatagaacacattctctgcactgagagggaaagaagagaactgtgctaattcctctggtttaatgagtgcccccttttatcttatgttcatttgaagttacattggagtagtaactggagaacacgcctcaggataaatgtttaataaaatactacagcattaaccaatagcatgtttgggaatttggggaagtttcacagagtgagcttttgagagtttgtactcatgtgtctgtgtgatacatacatgtttaagaataggtgtttgtggccaggagtggtggctcatgcctgtaatcccagcactttgggaggcgaggcaggtggatcacctgaggtcaggagtttgagaccagcctggccaacatggtgaaaccccgtctctactaacaatacaaaaattagctgggcgtggtggtgggcacctgtaatcccagctactctcaaggctgagatagcagaatcccttgaacccgggaggcagaggttgcagtgagccaagattgcgccattgtactctagcctgggcattaagaaggaaactccgtctcaaaaaaaaaaagggggggtttgggtttttcattttcatacgaagtcaaaatccaacccttccaccctcttttttttgaaggaccccttccttctcctcaatcaccagtgccaacagtgttgatcttcctgcctgtttcttcttgaaatttccccagccaatcccagtatctagagcatttgttcagaaactgcagagctgcacaggtgagttttgagcatcaggatctagtatttgttataagtgtgaaaaagaaacttcaaagtcaggttatcgtgatgtctttcagtcttacatgcctcattgaagtattaactggtatagatgttatagtgctttgtactagtaaatgcttagtaagtagtcttttgggtgaatgaatgtagaaatcatgaaggggaaaccaagctgtcagtgttttcatcttaacatgatcattatattgattcttgtttttccaggaattccattgtttgaaactcaaccaacttacgcacccctctatgaactgatcactcagtttgaactatcaaaggaccctgaccccatacctttgaatcacaacatgagattttatgctgtaagtaaagccttagggagctagaatgttataggttatatttggacccaagatcataatcttcctttatagcattattgaggtcagataagtttcttcaagactgctggatcatgtcctatgtccttagtaaggcaagaaattacagaaatctcagaaatgggctgggcgcagtggctcacgcctgtaatcccagcactttgggaggccgaggcaggtggatcacgaggtcaggagtttgagaccagcctggccaatgttgtgaaaccctgtctctaaaacgacaaaatattagccgtgtgtggtggcgggtgcctgtaatcccagctactcgggaggctgaggcagaagaatggcatgaacccgggaggcagaggttgtagtaagacaagattgtgccattgtgctacagcctgggtgacagcaagactccatctcaaaaataaaaaagaaatctcagaaatgtactgaagtaaaagggcatgagcttccattaggaaacaacaatgtacgtttctttgttgaaattttgggtgattagccaggcgcagtggctcacacctgtaatcccgggaatttgggaggccaaggcgggtggatcactagagatcaggagtttgagaccagcctggacaacatggtgaaacctcatctgtactaaaaatacaaaaattagccaggtgtggtggtgcatgtctctaatcccagctacttgggaggctgaggcaggagaatcgcttgaacccgggaggcagaggttgcagtgagccgagactgcgccactgcactccagcctgggcaacaagagtgaaactccatctcaaaaaaaagaaaaagaggccgggcgtggtgtttcacacgtctaatcccagcactttgggaggccgaggcgggtg

SEQ ID NO: 1054 - DNA, 32306 bp, Macaca mulatta
  source 1..32306: mol_type = genomic DNA
ttatctcgcgaattttgggaagttccgttggggaagatggcggcggcctcgagcacccttctcttcttgccgccggggacttcagactgatccttcccgcgaagagtagggactgctggtaccctgcgtcctggaatcccgagccaacttgtttcccccgttagtggtggggaagggcttatccttttgtggcagatccagtctctcgccgccttcaggatgaaagctcagggggaaaccgagggtaagtgactgagggggaaaggagggggcgggacacaactgggggagccagtttgtgagagaaggttcttgcagatgtcccatgggggccacttgaggggcacagagtccgggagagggaatgtgtatgagttttagattgtcactataccctccttgatgactatagagcttcgactttggggtgatggggactctcaacttctgtgaagatttcatgctcggctagggcacttttggcctaaagtggtgcgagacggggctagtgaatacaaaaccagcttacatctccttccagaagagacgcctgaataaatttagggctgtgtgtaaacgtactggagactattttggcatgaatgaaatgattaattccttgtatttattagcagccagcggatccctacaatgtcaagtgttcagatcctgtactgttgtgtatttttaaactgtgctgaatttcattcttttattgaccgaactaataactgcagaaaaacaactttcctggggaactttactaagattttctaaagttccacactccggcttagatgcttccttggcattttgggcatagttctgttgatacagtgagctgtgttattgtttgtttatctccagtttactctgagctttgcagattagggtccttgcctgattcatttttatatagtttctggaatgtaatagtcgctcaaaaaatcttggagcatcgaagtgcagatatttatcagcaggtttctcaagaaaaacaaggagtgtgttttggaggagaggtcgaaaggtgaggccccgcgggagcagtgactcacatctgtaatccctgcgctttgggaggctgaggctggaggatcccttgagcccaggagtttgagacctgcctgggcaacatagtgaggccctgtctctacaaaaaaatgaaaaattgccgggcgccgtggctcacgcctgtaatcccagcactttgggaagtcgaggcgggcggatcacctgaggtcgggagattgagaccagcctgaccaacatggagaaaccctggctctactaaaaacacaaaattagctggctgtggtggtgtatgtctgtaatcccagctacttgggaggctgaggtgggaggatcacttgaacccaggaggtggaggttgtggtgagccaagattgtgccattgcactcctgcctgggcaacaagagggaaacttcctctcaaaaaaaaaaaaaaaaaaaaaaaaaaattggctgggcgtggtggctcattcctgtaatcccagcattttgggagaccaaggtggcggatcacctgaggtcaagagttcaagaccagcctggccaacatggtgaaaccctgtctctactaaaaatacaaaattagcccggcatggtggcatgcctgcaatcccagctacttgggagactgaggcaggagaatcactcaaacccaggaggtggaggttgcagtgagccaaggtggtgccactggactccagtctgggcaacgagagcaaaactccgtctcaaaaatataaataaattaattaaaaataaataaataaataaaataaaaaataaaaaaaattaggaccaggtagtgactcaaggatgtagtcccagcactttgggagaccgaagcaggcagatcacttgagctcacaagttggagaccagcctggacaacctggcaaaagcctgtctctacaacaaatataaaaattaactaggcatggtggcacaagccagtagtctcagctacttgggaggctgaggtgggaggattacctgaatcctgtaggtcaaggctccagtgagccagaattgtgccactgcactccaacctgggtgacagagcgagaccctgtttcaaggaaaaattagctatagccccagctactctgaaggctgagctgggaggatcacttgatcctggagcatgggaggtcgaggctacagtagaccttgattgtgccaatgcacttaagccggggctgcagagtgatgctctgtcttaaaaagaaaaaatgtactcctcaggtgcaaggggagaagggtaaaaatggaaactttgtgaagtaggagtttttgtctggtttgttcactgctgtctttttagcaatttcatttattctttttctttttttaaaaaattttcctctctaacccagttcaataacttttttttgacacaatgtctccatctgttgctcaggatggagtaagtggtgtgatcaaggcccatctctgaagcttcgacctcccaggctaaggtgatccttctgcctcagcctccagagtagatggggactgactataggcacatgccaggaggcttggctaatttttttctttttctttttttttgagacagagttttgctcttgctaatgctggagtgcagtagtgtgatctcggctcactgcagcctttgccttctggattcaagctattctcctgccttagcctcccaagtagctgggattacaggcatgcaccaccataccaggctaattttgtattttcagtagagacagggtttggccggtgcggtgtctcaggcctgtaatcccagcactttggtaggctgaggtgggtggatcatctgaggtcaggagttcgagagcaacttggccaacatggtgaaaccccgtctgtactaaaaatacaaaaattagctgggtgtggtggtacatgcctataattccagctactagggaggctgaggcaggggaattgcttgaactcgggaggcggaggttgcagtgagccaagattgcaccactgtactccagcctaggtgacagagcaaaacaccatttcaaaaaaaaaaaaaaaaaagtagagatagagtttcaccatgttgaccacggtggtctcaagctcttgacttaggtaatctgcctgcttcggctttttaaaatgctggggttacaggtgtgagccactgcgcttggcctgacaaatttttttttttttaaagtagtgacgagatcttgttatgttgcccaagctgtagttgaactccccagcttaagtattctcccatgttggcctcccaaagtgctagtgaggattacaggtgtgagccacagtgtctggcctccccagcacttttactagtgcttgaggtcgggtgtggtggctcacacctgtaatcccagcagtttgggaggccgagtggatggatcatctgaggtcgggagttcgagaccagcctgaccaatgtggtaaaaccccatctctactaaaaatacaaaattagcttggtgtagtggtgcgtgcctgtaatcccagctacttgggaggctgaggcaggagtactggttgaacctgggaggaggtagaggttgcagtgagccgagatcgcgccattgcattccagcctgtgcatcaagagtgaaacttcgtctcaaaaaaaaaaaaagtttggatagaaaacagtccagctgtatggtattccttacatcagacctataatttgtgtgtcatcttgccattaaaaatgtcttcttttcttttttttttgagactgagtctggctctgtcgcccaggctggagtgcagtggccggatctcagctcactgcaagctctgcctcccgggtttacgccattcttctgcctcagcctcccgagtagctgggaccacaggcgcccgccacttcgcccggctagttttttgtattttttttagtagagatggggtttcaccgtgttagccaggatggtctcgatctcctgacctcgtgatccgcccgtctcggcctcccaaagtgctgggattacaggcttgagccaccgcgcccggcctaaaaatgtcttctttggatattttgaagtaaaatgattttggaaaatattttaactgaattcttactgagatgaagtgtgggaatttattttgcaaggaaaactgtggatagtcttgatagaacagttactgatgacgttttctgatttgaatcgcagagtcggaaaagctgagtaagatgagttctctcctggaacggctccatgcaaaatttaaccaaaatagaccttggagtgaaaccattaagcttgtgcgtcaagtcatggtaaggattgtggtgaagtgggtaaagtgttttgcgtagataattattctttttttttttttttttttgtgagacggagtctcgctctgtcacccgggctggagtgcagtggccggatctcagctcactgcaagctccgcctcccgggttcacgccattctcctgcctctgcctcccgtgtagctgggactacaggcgcccgccacctcgcccggctagttttttgtattttttagtagagacggggtttcgccgtgttagccaggatggtcttgatctcctgacctcgtgatccgcccgtctcgacctcccaaagtgctgggattacaggcttgagccaccgcgcccggcccgataattattcttaatacgctaagttcctcatgtaaatgtattcatactatcttcataaaacatctgaatacatggtggtttcaactttaggagtcttattgtatctatactacaggttgaatatcccttatctgaaatgcttgggcccagaagtgtttcagattttggattgttttgaattttggaatatttgcaaatacatagtgagatatcttgggggatgggacccaagtctaaacacagaatttatgtttcatacaccttatagatatagcctgaaggtaattttatactatatatatatatatatttttttttttgaggcggagtctcgctctgtcgcccaggctggagtgcagtggccagatctcagctcactgcaagctccacctcccgggtttacggcattctcctgcctcagcctccggagtagctgggactacaggcgcccgccacctcgcccggctagtttttttgtatttcttagtagagacggggtttcaccatgttagccaggatggtctcgatctcctgatctcgtgatccgcccatctcggcctcccaaagtgctgggattacgggcttgagccaccacgcccggcctatacaatatatttaataatatatttaatacttttgtgcatgaaacaaagtttttttattttttatttttttattttgagacagagtttcactcttgttgcccaggctggagtgtaatggaccgatcttggctcactacaacctctgcctcccaggttcaagtgattcttctgcctcagcctcctgaatagctgggattacaggaatgggccatcacgcctggctaatttttatgtttttagtagagatggggtttttccttgtcggtcaggctggtcttcaactcctgaccttaggtgatccacctgccttggcctcccaaagtgctgggattacaggtgtgagcaaccatgcccagccgttttgactgcattttgaccatgaccctgttatatgaggtcaggtgtgaaatctttgatggcatcattgtgaatgctaaaaaggttttggattttggagcattacagatttttgattttctaattaggtctgcccagcctgtactagaagagtttttgattcattcttttttttgagatcgggtcttactttgtcatctaggctcaagtgcagtggcatgatcatggctcactgtagctttgacttcccaggcttaggtggttctcccacctcagcctcccagtatctgggacaacaggtgcatgtaaccatgcctggctagtttttttttttttttttctttgagatggagtctctgtggccagtctggagtgcaatagtgtgatctcagctcaccgcaacctctgtctctcgggttctagtgattcccctgcttcaacctcccaagtagctaggactagaggtgcacgccaccatgcctggctaattttttgtattttagtagagatggggtttcaccgcgttggccaggatggtctccatctcctgacctcgtgatctgcctgccttggcctcccaaagtcctgggattacaggcgtgcgccactgtgcccggctgtacagctagttttttacatttttgtagaaataggtttttttttttctttttttttttttgagattgagtcttgctctgtccccccgggctggagtgcagtggtgtgatctcggctcactacaagttctgcctcctgggttcacaccattctcctgcctcggcctcctgagtagctggaactacaggtgcccgctgccacacccagctaattttttgtatttttagtacagacagagtttcagcgtgttagccaggatggtcttgatctcctgacctcgtaatctgctggtcttggcctctcaaagtgttgggattgcaggcgtgagccactgctcccagtcagaaataggtttttaccatgtggcccaggctggtctcaaacttgtgggctcaagtgatccacccaccttggcctcccaaagtgttatgattacagtgtgagccaccatgcctggcggattaatttttttttttttttttaagatggagtctccatctgtcgcccaggctggagtgcagtggcaggatcttggctcactgcatcctctgtctcctgggttcaagtgattctgtacagctactcaggaggctggggctcccgccaccatgcccagctaatttttgtatttttagtggagatggggtttcaccgtgttagccaggctggtctcgaactcctgaccttgtgatccacccacttcagcctctcaaagtgctgtgattacaggtgtgagccactgcgcctggcccaagttgtcatttttattccttaaggcaaccaaattctagcttgaaatatgttctgtagaagatactgtcattagagagacattgtgagatagaaggattccaggtggctattaaggccctctgtttgggtacccactatcttggtttggtcaccatgactttccatgtctacttgtcagttttgcagattcagaaacctaattttattggtatgttaaggttttatagagttttcgtggccgggcgtggtggttcacacgtgtaatcccagcactttgggtggccgaggtgggtgaatcacctgaggtcaggaggtcgagaccagcctgaccaacaaggtgaaaccctgtctctactaaaaagacaaaattagccagttgtggtggcaggtgcctgtagtcccagctactcaggaggctgagacaggagaattgcttgaacccaggaggtggaggttgcagtgagcggagatcacgctactgcactccagcctgggcatcagagcgagactccatctcataaaacaacaaaaaaagttttcaacaactgacatactatatgcttatttattaatttataacaaaacgtttagttttccagttttcataatactggtattcattgaccagagcacctcttctcctgtcaagaatcaagagatttcagattattaataaattactttgttttgtaagggagaattagagcagtgagatagatttatttgcaacatggaaaagcctggaaaactatccttataccagaaaattgttcacatttttagggaatggaatgtttttcagagggaaacttcttcactggatagcattaggaaaactgggctaagttttttgttctttggaagtcccttttctggactacatgttctgtgtcttttctgtttctttttttttttttccaagacagattctcgctctgttgccaggccggagtgcagtggcacgatctcagctcactgcaacctctgcctcccaggttcaagcgattctcctgcttcagcctcttgagtagctggcactacaggcatgcgccaccacacccggataatttttgtatttttggtagagatggagtttcaccatgttgaccagaatggtctcgatctcttgacctcatgacctcatgatccacctgccttggcctcccaaggtgctaggattgcaggcgtgagccaccgcacccagcctacatgttctattttttagagtcaatctcattttcctaaaatttggttgtgtttctcagattacatgcaaatcaccttgttaaatttgtacactaccaaatctcctgagccatcttatttaactgtttatatcttagcatatagtcacttccacaggaggcagatctcatctattacattttgattcttcctaatatttctgtaaaggttttcttgttttagatgtggaaatatgtttttctttttcttttttgtttttaactaaatagaaacaggatctctctatcttgccttggctggtctcgaactcctggactcaagtgattattcagctttggcctcccagtgtgctagaattacaggcatgagcctgtgcctggctgaggaatacctttttctacactcatgtatatggatttttcttcctttggatggatggacagagtaacacttgtagatcagtgttactctatatagtctacaaagtctgtagcctatattgagtctatagactgtcctgcaatattactactaggataatgtgtatgtttacccaaaacactgttggcctggttaattttcacctcaaatgttttcccacttgacacaggagaagagggttgtgatgagttctggagggcatcaacatttggtcagctgtttggagacattgcagaaggctctcaaaggtttgtaaacgcttttgaaatatgctgatttcacaaaacccccagtttaagaaggaccattttatacttagacttgaagtataaattgaggtaggtctactttatatactagatattgctcttgcattcatttatggagttggaatgagctttttgctatagtttgaaacatttattttcgatcctgttttggaggatgatagagattaaaagataaatgatgaagggtaatataagatacctggggaggtcgggtgcggtggctcactcctgtaatcccagcactttgggaggctgaggcgggcggatcacaaggtcaggagtttgagaccagctttggccaacatggtgaaaccccatctccactaaaaatacaaaaattagccgggcatgtggcgggagtcccagcctcctgagtagctgtatagaatcatgtttttagtatctactaaaaatactgtctctgctaaaaatacaaaattagctgggcgtggtggtgggcacctataatcccagcttcttgggaggctgaggcaggagaatagtgtgaactggggagccggaggttgcaatgagccgaaatcacaccattgcagtccagcccaggcaacagggcgagactctgtctcaaataaaaaaaaaaaaaaaaaagagatacctgggaaaagttttttttttccggttttttttttttttttttttttgagacggagtcttgctgtgtcgcccaggctggagtgcagtggcacaatcttggctcactgcaagctccgcctcctgggttcatgccattcttgtgcctcagcctctggagtagctgggactaccggcacccgccaccacgcccggctaatttttttctattttttagtagagatggggtttcaccatgttagccaggatggtctcgatctcctgaccttgtgatccacccgcctcggcctcccaaagtgctgggattacaggcgtgagccaccacgcccggcaaagttttttttttcttcacatgtttttttctgattaatctcgataagaagatggactttttttttttttttttgagacagagtttcactcttgttgccctggctggagtgcaatggtggaatctcagcttacgacaacctctgcctcctgggttcaagtgattcttctgcctcggcctcccaagtagctgggattatgggcatatgccatcatgcccggctaattttgtatttttagtagagacagggtttttcatgttggtcaggctggtcttgatctctcaacctcaggtgattcacccgccttggcctcccaaagtgctgggatcacaggtgtgagccactgcacctggcgacgtttttttttgtttgtttgttttaagacacagtctcactctgtctcccaggctggagtgcagtggcacaatcttggctcactgcaacctccacttcctgggttcaagcgattctcctggctcagcctcccaagcagctgggactacaggtgcatcctaccatgcctggctaattttttgtatttttagtagagatggggtttcaccgcattagccaggatggtatcgatctcctgacctcgtgatccacctgcctcagcctcccaaattgctaggattacaggcatgagctaccatgcctggctagaagatggacattttactctaaaaagatttttacgatgtttatggagcaaatttccgggaaaataaatgtaaaatataagtcatgagcttgattattcatgcttataatgactaattctattttttgggaataatgaaagtaaaaacagattttactttgatccactggaaatgaacctaattcagctgaggtttttttttttttttcttctttggagacggtgtctcactctgtcgcctaggctggagtgcagtggcgtgatctctgctcactacaacctccgtttcctgggttcaagtgattcttctgcctcagcctcttaagtaactgggattacaggtgcccattaccacgctcggctaatttctggatttttagtagagatggggttttgccatgttggccagggtggtcttggactcctgacttcaggtaatctgcctgccttggcctcccaaagtgttgggattacaggtgtgagctactttgcctggtctcaggagtgcaatggtggaatctcggctcaccacaacctctgcctcctgggttcaagtgatttttctgcctcagcctcccaagtagctgggattacaggcatatgccaccatgcctggctaattttgtatttttagtagagactgagtgttattttctttatcttttttttttttctttttttttttttttttgagacagagtcgctgtgtcacccaggctggagtgcagtggcgccatctctgctcattgcaaccactgccccctgggttcaagcaattctcttgcctctgcctcttgagtagctgggattacaggtgtgcaccaccatgcccagctaatttttgtatttttattagagacagggtttcaccatgttggtcgaacccctgaccttgtgatccgcccgcctcggcctctgaaagtgctgggattacaggcgtcagccaccgtaccaggcctttttttctgttttaattgtggtaaaatatagataacgtaaaatttaccattttctctgtttctaagtatatagttcagtagcattaagtacattcatttattgtataatcatcaccactctcaatctgtaaaacttcactcatcttcccaagcttacattctgtaatgtctcattcccgccttcccccagtccctggcagccaccattctgcttcctttctttttttttttttttttttttttgagacagagtcttgctctgtcgcccaggctggggtgcagtggcctgatctcagctcactgcaagctccgcctcccgggtttagaccattctcctgcctcagcctcccgagtagctgggactacaggcgcccgccacctcgcccggctagttttttgtatttttttagtagagacggggtttcaccgtgttagccaggatggtctcgatctcctgacctcgtgatctgcccgtctcggcctcccaaagtgctgggattacaggcttgagccaccgcgcccggccttctgcttcctttctttatgaatttgactactctgtatacctgatataagtggaatcataccatatttgtccttttgtgactggcttatttcacttaacataatgtcttcaaggttcatctattttgaagcatttattagaatttcttccttttttaaggttgaaaaatactcctctctacatatatacatttcgtttatccagtcatccgctagtggacacttggattgttttaaccttttgactgttgtgattaatggtgttgttaatgttgagtatttgtttttatgttagttttaatgttaatcttccttattctatcattagcagataaatgtatcttaagttaaaggtagcttgtcccacataaggagtaatgaaaacaggagaggagaaaggtccagtaatttttctttttttttttttttttgagacggagtctcacgctgttgcccaggctggagtgcagtggcgcgatctcggctcactgcaagctccgcctcctgggttcacgccattctcctgcctcagcctcctgagtagctaggactacaggcgcccgccaccgcgcccggctaattttttgtatttttagtagagacagggtttcactgtggtctcgatctcctgaccttgtgatccgcccgcctcggcctcccaaagtgctgggattacaggcttgagccaccgcgcccggccagtaatttttcaaatagatctttttttttgacctttagtactgcataggccacagctaacccttaccaataaactttatgcacattacaagcatttgaactactgaatatatttatggttttggaaggattaatctttctgtcttcaaagaataccatttaagttatttggagcattctttgtgacttccttttttcatcctcttatagtaacatctttaccagcaatgactgatcgtttggagtccatagcaagacagaatgggtaagtagtctttctgtaggcagaaacgtttaacttagtgttaactttgggtggctttatttatgtgtcttctattaatttttgttttgatttgttcctgctagactgggctctcatctcagtgccagtggcactgaatgttacatcacgtcagatatgttctatgtggaagtgcagttagatcctgcaggacagctttgtgatgtaaaagtggctcaccatggggagaatcctgtggtatgtgttgttgatatttcactggaatctgtggggtttatgtagggacattaattttaaaattaattggtggggtttaaagagcttgggtttaggttttttcatgagccactgtagagatgatgtgatgggctacaaaatcaacagctatagaatggaatttagaaaacacgggtcccatctctgacatcatccaaagactttgaccagtggaaacaccataggaaaccttttccttccttccttccttccttccttccttcttttcttttttcttttcttttcttttatgtcttcttcttttttttttttttttttttttttgaggcagagtctcattctgttgtccaggctgtagtgcagtggcatgatctcggctcagtgtaatctccgcctcctggactcaagtgattctcctgcctcagcctcccaagtagctgggattataggtgtatgccaccacgcctggctaatttttgtatttttagtagagatggagtttctctatgttggccaggctgttctctagctcctgacctcaagtgatccacccacctcagcctctcaaagtgttgggattataggcgtgagccactgcacccggcgggaacccttttcatttcatatcaacaaacgtgagccgcaattgaacaataggtgctggggatacagaaataaatgactcagggttcctaccctcaaagagattataatcaagaacagatgatctgaaaaattctgtaatagagatgaatgtaaaatgtgtgtaaccagacaatttgatatgaattccatgtatggcattagagttcttaatgttttaaacaagctactgaaagttgattcctttaaaaactatttcatatgctttgactttaaatttctcaccctaatcctatggttcaccaagtaggaagaaggtgctttttaatattttaatatgaggactatctgtagttttaacggttttgctgtaaaacatgtgctatagaaagagaaagacttttgatatcttcaaagttgctaaaggagttttaatgttttaacataatttctttgatttcagagctgtccggagcttgtacagcagctaaggtgagcaaataagatttatattccttgatattgacagacagtgctgttctttacagctaggttttaagactggtcagaagttattctcctcaggaacaagtttattttcttgggcaaagacttttaaggtctgtacttaatcacgtcctgaattgacatagcacagcttttcaccctactctatcccagggctttttttttttttttttttttttgagatggagtcttgctctatcgcccagggtggagtgcagtagcacgatctcagctcactgcaacctctgcctcctgggttcaagcaattttcctgcctcagcctcctaagtggctgggactgcatatgtgtgccactacgcctggctaatttttgtatttttaatagagacaaggtggctgggtgcggtggctcgcacctataatcccagcactttggaaggctgaggcgggtggatccacgaggtcaagagttcaagaccagcctggccaagatggtgaaaccccatccctattaaaaatataaaatttaggatcacacctgtaatcccagcactttgggaggctgaggcgggtggatcatgaggtcaggagattgagatcatcctggctaacacggtgaaaccccatctctactaaaaaaaaaaaaaaattagctgagtgtggtggtgggcatctgtggtcccagctactcgggaggctgaggcaggagagtggcgtgaacctgggaggcagagcttgcagtgagccgagatctcaccactgcactccaacctgggtgacagagcaagacgccgtctcaaaaaaaaaaaaaaaaaattagctgggcgtggtggccagtacctgtaatcccagctacccatgaggctgaggcagaaaattgcttgaacctgggaggcggaggttgcagtgagctgagatcgtgccactgcactccagcctgggtgacagagcaagactccatcttaaaaaaaaaaaaaaaaataagggccgggcgcagtggctcacacctgtaatctcagcactttgggaggccaaggcgggcaaatctaagaggtcaggagatcgagaccatcctggctaacacggtgaaaccccatctctactaaaaatacaaaaaattagccaggcgtggtggtgggcgcctgtagtcccagctactcgggaggctgaggcaggagaatggcgtgaacccaggaggcggagcttgcagtgagccgagatcacgccactgcattctagcccaggcacagagcaagactgtctcaaaaaaaacaacaacaaaaaaaatagagacgaggtttcgccatgttggccaggctgatctcgaactcctgacctcacgtctcccaaagtgctgggattacagttgtgagccaccatgctgggcccttttctttttttttttgagacggagttttgttcttattacccaggctggagtataatggtgcagtctcggctcactgagcacctggccccttttctatttttttttcttgttttttttttttttttgaaatggagtctcgctctgtcacccaggctggagtgcagtggccagatctcagctcactgcaagctctgcctcctgggtccacgccattctcctgcctcagcctcccgagtagctgggactacaggcgcccaccgcctcacctggctagttttttgtatttttagtagagacggggtttcaccatgttagccaggatggtcttgatctcctgacattgtgatccgcccgtctcggcctcccaaagtgctgggattacaggcttgagccactacgcccggcccccttttctattttttaaattttttttttttttttttttttggtgagatggagatttactcttgttgcccaggctggagtgcagtggtgcgatctcggctcaccacatcctccacctccgaggttcaagcgattctcctgcctcagcctcccgagtatctgggattacacgcatgtgccaccacgcctggctaattttgtatttttagtagagacggggtttcaccattttgcccaggctgatctctaactcctgacctcagatgatctgcccgcctcagcctcccaaagtgctgggattacaggcgtgagccactgtgccaggcctatttttttttttttttgagacagagtctcgttctgtcacccaggatggagtgcagtggcgtggtctcgactcactgcaagctccacctcccggattcatgccattttcctgcctcagcctcccaagtagctgggactataggcgcccaccaccacgcctggctaactttttctatttttagtagagacggggtttcacttgtgttagccaggatggtctgatctcctgaccttgtgatctgcccacctcggcctcccaaagtgctgggattataggcgtgaaccactgcgcctggcccctatttttttaatttttaatttttttttcttattttgcctcagtttcccaacagaaagatatcccagggtctcttaaacttggtactaatgacaatttggattggaaattctttgctcctgggcggcctggtttattctgttatgtttaatagcatcccttgcctcttcattagttgccggtagttatctccttagttgtcacaaccatgtcccctggggtgcaaaatcacccctggttggaattgctgatctaggtttaggaattccatatagctgggggtggtggctcatgcctataatcccaacaatttgggaggttgaagtgggcagatcacttgaggccaggagttcaagaccatcctagctagcctggcgaaactctgtctctacaaaacatacaaaaattagcggagtgtgaagctgggcgcggtggctcatgcctgtaatcccagcactttgggaggctaaggcaggcggatcccagcctgaccaacatggagaaactccgtccctaaaaatactaaattagccgtgtgtggtggtgcatgcttgtaatcccagctacttgggaggctgaggcaggagaatcgcttgaacctgggaggcagaagttgtggtgagccaagatcatgccattacagtccagcctgggcaacaagagcaaaactgtctccaaaaaaaaaaaaaaaagttagctgaatgtagtggctcacatgtgtaatcccagctacttgggaggctgaggcaggagaatcgcttgaacctgggaggcagaagttgtggtgagccaagatcatgccattacagtccagcctgggcaataagagcaaaactgtctcaaaaaaaaaaaaaaaaaaagttagctgagcgtagtggctcacatatgtaatcccagctacttgggaggctgaggtagaaaatggcttgagcctgggaggtggagattgcagtgagctgggatcacatcactgcactccagcctgggtgatggagcgagactgtctcaaaaaaaaaaaaagaattgtgtgtggaacaaaataaatagtaagtaatcattgaatcagagaaggcttgataattgagtataccatgagaataactttttcgctttgattttgggaaaaattgtttcatttagaaggtatgcatgtgttacaggaaaagtgctaggcttgaaaacagtcacttttagcacatcgtggattttttcacttttcttttaattgagtggaaatatctgtacttaaatttaaactcagaattaagacttttggggaatttaaggaagttattacataccctttgttttgagcatagcagagttctcaggtaccacatgaggatgtcttagagtgttcacattgagaaaataaggggtgtgtgtgtgtgtgtaaaagtgtttttttttttcttttctttttttttgtttttgagacggagtctcgctctgtcgtccaagctggagtgcagtggcgcgatctctgctcactgcaagctccgcctcccgggttcacgccattctcctgcttcagcctcccgagtagctgggacttcaggtgcctgccacacgcccggctaattttttgtatttttagtagagatgggatttcatcatgttagccaggatggtctcgatctcctgacctcgtgatccacccgcctctgcatcccaaagtgctgggattacaggcgtgagccactgcacctggcctttttttctttttttgagatggtatctcactctgttgcccagtgcagtggcacgatcttggctcactgcagcctccacctcccgggttcgagcgattttcctgctttagcctcctgagtagctgggattacaggtacctgccattatgcccggctaatttttgtattatccgggtgtggtgaaaccttctctctactaaaaatacaaaaaattagctcagtgtggtggtgctcgtctgtaattccagctacacaggaggttgaggctggagaatctcaggaacttaggagggagaagttgcagtgagctgagatcgtgccatgccatcacactccagcctggtggacagagtgagactctgtctcaaaaaagaaaaaaaaaacaaaacaatgttgacttttacctgatatttagtcatttagtatagatggtaatattaaggtaaagaatatattttgctgctactcttgtttctttttactctcttaatagcactgtggactgtaagtgctcagtaaatgctcacagaatgtctgctcaagtgtctgaccttgtcatggcagtttagctttccagagagctttttttttcaagtttgaaaaaagatatcaagagttagaattctggagatgtattggattcctaaacctatccacaaaaacccatttggctgagaatcaaagcatgaatatttggtcctagaaagccagaggtcatggtagtagtttattttttctggggtagatctggtcatagcaatattttctaatgggtagtttgcctccagggtacccactaccttttctctgggtctccatctctgtcctagtatttattttccctctcatctttgctctcatgttgctgtatacccacaagtgttatgtcttcccaatttattttcgttctttttttttttttttgagacagtcttgctctgtcccccaggctggggtgcagtggcgtgatcttggctcactacaagctccacctcccgggttcacgccattctcctgtctcagcctcctgagtagtagctgggactacaggtgcccgccatcacacccggctaatttttaaaaatatttttagtagagatggggtttcaccatgttagccaggatggtctcgatgttctgacctcgtgatccacccgcctcggcctcccaaagtgctgggattacaggcataagcccctgtgcccggcccttcctaatttattttcttctcattatctctgcaatcaaaagttttatttctgttgacatccaaattcaattacatatttggaggaaaggagctgggtgtggtggtgcacacctgtagtcccagccacatgagaggttgaagtgagagcattgcttaagtcctggaattagagtctggcctgggcaacatagggaaaccccatctctataaaaacattaataaaaagggaaaagagccgggtgcggtggctcacgcctgtaatcccagcactttgggaggccgaggcgggtggatcacgaggtcaggagatcaagaccatcctggctaacacggtgaaaccccgtctctactaaaaatacaaaaaactagccaggcgtggtggtgcgtgcctgtagtcccagctacttgggaggctgaggcaggagaatggcgtgaacccaggaggcagagcttgcagtgagccgagatggtgccactgcactccaacctgggcaacaaagtgagactctctcaaaaaaaaaaaaaaaaaaggaaagttgttaataattgatttaaatcaggtttcattacttgggagctaataaaactacctggtagagaggttttgaccacctaccttttaactttcacactgtttattggtaccttctccagcaaaaatggagcagagagacaaaggaaaatattttcttttcttttgctacttttcgttgatgctagaaaacttttgaggaaaacagttaaagctgattgttaaaatcagttttatatagctgtgatttttggcactttgttgtaagatggagtagtaattttatgttgtattttcctctctttcccctctcccgtgaactccttatagggaaaaaaattttgatgaattttctaagcaccttaagggccttgttaatctgtataaccttccaggggacaagtaagtatttttaatatttttgctcttgtttggaaaaatcagtataaatctataagccaccttatgcctagaaatttgccaactcttctactatttgtcactcctagtttctacttacactgtaatctgtagctcagcttccaacgttaggcctctaaaagatatcttcaataggcagtgcctgcattaattgatcataatgctggaagacagaatattatctttgagatgtccaacattccaatttccaggctgaaaggaattagttgttgtggaactggctttaattctacttttaacctacctgggattctattaacctatttgggttttaaaaacagagatgaaaataagctttgaagtgctaaaaataggctttaatagtagtgaagccagtcaaagtggcccatgcctctaatcccagcacattgggaggccaagacagcaagatttcttgagctcagagatcaataccagccttggcaacatagtgagaccctgtctctagcagaaagacaacaacagcagcttagatgggtggtggtgagtgcctgtagtcccagctacttgggaggctaaggtgggacgatcacttcaaattagtagtttgagggtgcagtgagcagtgattgtgccactgtgctccagcccagtcgacagtgagatgctgtctcaaaaaaaaattatgtagtgacaaaaataattttattttaaaaattaatgttttaggctgggcacagtggcttacacctttaatcctggcactttgggaggctgaggtgggtggaccacctgaggtcaggtcaagaattaatgttttaatttttttttttttttaatacggagtgtcgctctgtcacccaggctggagtgcagtggcacaacctcagctcactgcagcctccgcctcctgggttcaagcagttctcctgcctcctccttctgagtagctgggattacaggtatgcaccactacacccggctaattttttttttttttttgagacggaatcttgctttgtcgcccaggctgcagtgcagtggtgctatctcggctcactgcaactgcagcctcctgggttcaagtgattctcctgtctcagcctcctgagtagctgggattaaaggcgccggccaccgcacctggctaagttttgcatttttagtagaggcgggttgtttcaccatcttggccaggctggtctcgcactcctgacaccttgatccacccgccgtggcctcccagagtgctgggattacaggcgtgagtcactgcacccggccacctggctaatttttgtagttttagtagagaaggggttttaccatgttggtcaggctggtctcaaactcctgacctcatgtgatctacctgcctcggcctcccaaagtgctgggattacaggcatgagccaccgcacctgggcagtttttttttttgttttttgagtttttttttttttttttgagatggagtcttgctctgccaccaggctggagtgcaatggcacaatcttggctcactgcaacctccgcctcccgggttcaagcaattctgcctcagcctcccaagtagctgggactatagatgcatgctgccacgcctggctaattttttttttttttttttttttttttattagagacggggtttcaccgtgttgcccaggctggtctcaaactcctgagctcaggcaatctgcccacctcagcttcccacattgctaggattataggcgtgagccacgccctattagccacactcggctactttttgtatttttagtagagacggagtttcgccatgttggctaggctggtctcaaactcctgaccttgggtgatctgcccgcctcagcctcccaaagtgctgggattacaggcgtgagccacttcgcccggtcataattttcaactgttaactcatgttcttctcatctactctccagcaaactgaagactaaaatgtacttggctctccaatccttagaacaagatctttctaaaatggcaattatgtactggtaagacttgtaaaaccttaattctacacgatcccttgagtttttctccaaggagattagggtcctattttatacatctctattaagcttgtatgatatatgtcctttctcttctgaaatgatgattgtatttgaacttctgagtatcagtatcattaagttgttggttaccataggttttgtctcaagactcatcagactccatggagtcccatctgagaaataatagtctaagtgtaatttttgttcaccatactacatactggtgtgtacttggaaataatccctttactttggaggttaaatacacttgctatatgctcaattacaagacagaaccattatgatagtattataagactttgggctgggcgtggtggctcacgcctgtaatcccagcactttgggaggccgaggcgggcggattacctgaagtcacgagtttgagaccagcttgtccaacatggtgaaaccccgtctctactaaaaatacaaaaaattagccgggcgtggtggcgggcgcctgtaatcccagctactcgggaggctgaggcaggagaatcacttgaacctgggaagtggaggttgcagtgagctcagattgtgccactgcactccaacctgggcaacaagagcgaaactccgtctcaaaaaaaaaaaaaaaagactttggagaggtgaactccatatcacagtgtgtaccaagaccatcaggcattaaatataagcaaacatagatcacttgtcttacaggaaagcaactaatgctggtcccttggataagattcttcatggaagtgttggctatctcacaccaaggagtgggggtatgtgatcctattttgcttgtttagaaacgtgtaatttaagttgagggtcattgcttttcatttcacctttagtttgtttgtttgtttattttatttttttgagacagagtctcactttgtcgcccaggctggaatgcagtgccatgatctcagcttactgctccctccacctcctaggctcaagtgaatctcatgcctcagcctcctgagtagctgggattacaggtgtgcaccgcaatagccagctaatttattctattgttggtagagacagggtttcactgtcttggccaggctggttctgaactcctcacctcaactgatcgacctaccttggtctcccaaagtgctgggattacaggcatgagccactgcatctagcccatttatttattaatttttattcttatgtatctgtttatttttcttttctttttttttttttttttgaggtggagtcttgctctgtcgcccaggctggagcgcagtgaccggatctcggctcactgcaagctccgcctccggggtttacgccattctcctgcctcagcctcccaagtagctgggactacaggtgcctgccacctcgcctggctagttttttttttttgtatttttttagtagggacggggtttcaccgtgttagccagaatggtcttgatctcctgaccttgtgatctgcccgtctcggcctcccaaagtgctgggattacaggcttgagccaccgcgtccggcctgtttatttttcttgagacagtctctcaccaggctggagtgcagtggctgaattttggctcactgcaacctctgcctcccgggttcaagcgattcttgtgcctcagcctcccgagtagctgggattacaggcatgtgccaccacactcaactaatttttgtatttttagtagagatggggtttcaccatgttggccaggctggtctcaaattcctgacctcaaatgatcctccctcattggctgcccaaagtgctgggattacaaacaggtattagccactgcactagtcctatttatttatttctgagacagggtcttgctctgttgcccaggctggagtgcagtcgtgcaatcatgactcactccagcctcaacctcctgggcccaaacaatcctcccaactcagtttcctgagtagctgggactacaggtgcaggataccatgcctggctaatttttattgttttatggaaacatggtgttactaagttgtctaggctggtcttgaattgggatcaagtgatcttcctgccactgcattgcaaagggttgggattataggcgcctggcctcatgttgggtttataaacatataaagcagagggagaaagttaaggtatttgtgtatttcgtgatgatttctttcttttttttttttttttttttgaggcagagtctcactctgtctcctaggctggagtacagtggtgcgatcttggctcattgcaacctctgcatcccgggttccagaaattctcctgcctcagcctcccatgtagctgggattacaggcacgtgccactatgcctggctaatttttgtatttgaaccagagacggggtttcactgtgttggccaggctggtctcgaactccggaccctaggtgagctgcctgccttggcctcccaaagtgatgggattataggcatgagccactgcgcctgaccttttcgtgatgatttctaagctgtcaatacctatccttcccatttttgtttgtttgttttgtttttgagacagagcctttctctgtccctctgactgaagtacaatggcaggaacatagctcacttcagcccttaactcttgggcttaagtgatcttcccaccttagccccgagtagctgggacttcagtcaagtgccaccatgccactttaacaattttttttagagatgggggtctcactatgttgcctaggctagagtgcagtggtgcagtcataactcactctagacttgaactcctggcttcaagtgatcctctggcctcagcctcccaaagtgttgggattataagtgtgagccagttcacctggcctttttttttttttttaaatcaattgtgtgaaataaattgttagtcccagaatccatacttaatcttctgtcatatgtctttttttccttttttttgagatggagtcttgctctgtcgcccaggctggagtgcagtagcttgatcttagctcactccaacctctacctccggggttcaagcaattcttctgttgcagcctcccaagtagctggtactacaggcgtgtgccaccatgcctggctagttttttgtgtttttagtagatatgcggtttcaccatgctggccgggctggtcttgatctcctgacctcgtgatctgcccacctcggcctcccaaagtgctggcattacaggcgtgtgccactccacccgggcgcctgtcatagttctttgttttttatttgtattttttcagacagggtcttgctttgccttccaggctggagtgcagtggcacgatcatggctcattgtatccttgacctcccaccttatcttcctgagtagctaggactacaggcactcaccagcaggccaggctaattattattattattattgttatttttgagatggagtgtcactctgttgccaaggctggagtgcagtggcgcgatctcagctcactgtaacctccgcctcctgggttcaagcgattctcctgcctcagcctctcatgtagctgggactacaggcgcatgccaccatgcccagctaattttttgtatttttagtcaagacggggtttcaccatgttagtcaggatggtcttgatgtcctgaccttgtaatcaacctgccttagcctcccaaagttgtgggattacaggcatgagccaccgcgcctggccaatgttttgtatttttagtagagacagggtttcatcatgttggccacgctggtcttgaacttcttacctcaggtgattcacctgcctcacctcccaaagtgctaggattacaggcattagccattgtgcccagcctattattattacttttagagatggagtctcactgtgttgcccatgctggtctcaaactcctggactcaagtgatcctcttgccacagcctcccaaagtgccaggattacaggtgtgagccaccatggctgccatatttcataagctgttttggagcttgactcttcatatatgttaaactactttcttgaatataggtttatataataaatgtttatgtttttctgtgtttgtaatttacctgataaagatacagttatgagttttctttttcataggtcatttaatgaacctcaagtactatgtctctccttctgacctgctggatgacaagactgcatctcccatcattttgcatgagaataatggtaagactttaattttaaaggaattaaagattttgttcggtgcccaggttgcctttaatttctggtttgctattctctaatgagtttgctgaccttaccatttgcaccttatacacacaacacctcacacacatatgtatacatcggttcacaagtacatacacacataggtatatacacaatacaaatatacacacatacatagtagaagcttagtaagtacttttgggctgggcacagtggctcacgcctgtaatcccagcactttgggaggctgaggtgggcagatcacgaggtcaggagttcgagaccaatctgaccaacatggtgaaaccctgtctttactaaaaatacaaaaattgcttgggcatggtggcgcgtgcctgtaatcccaactactcaggagggtaaggcaggagaatcacttgaacccgggaggcggaggttgcggtgagccaagatcgtgccactgcactccagtctgggtgacagagtgagcctccatctcaaaaaaagaaagtattttgaataaataagtaaatgagtgagtcataagaagagatatcaaccatctgacctgagataatcagcttacttactgttttaaaagtaaagaaggatgggcatggtggtttatgcctgtagttctagctacttaggaggtttgggcaggaggattgcttgagcccaggagtttgagactgtagcataccatgatcgtgcctgtaaacagtcatggtactccagtctgggcaatgtagtgagttactgatcaaaaaaaaaaaagtgaagttagttttctaaattaaagaactatagtaatggacattattttctgtttgccctttatacaagaaaagataaagagaaatagactgccgggcatggtggctcacgcctgtaatcccaccactttgggaggctgaggtgggcgaatcacctgaggttaggagtttgagaccagcctaaccaacatggagaaaccctgtctctactaaaaatacaaaattagccaggtgtggtggtgcatgcctgtaatcccagctactcaggaagctgaggcaggagtattgcttgaacccggaaggcggaggttgcaatgagccaagattgcaccattgcactccagcctgggcaacaagagcaaaactccatctcaaacagaaaaaaaaagtgaaatggactaatacctccttaggtccctttgtagcttccctcaatgactccatccctttattgtttgtttgtttgtttatttatttatttaagatggagtctcactctgtcacccaggctggagtgcagtggtgtgatctcagctcactgcaacctacatctcctgtgttcaagtgattctcctgcctcagcctcccaagtagctgggactacaggcgtgcaccaccatacccagctaattcttgtatttttagtagagatggggttttactatgttgaccaagctggtcttgaactccttacctgaagtgatccacctgtcttggcctcccaaagtgctaggattacaggcgtgagcctcggtgtcaggctcctttattgttattataatttggcatgggggacagggtaggtctcactgtgttgcccaggctggagtacagtgatttgatcacagctcactgcagcccctgaagccctgggctcaagccatcctcctgcgttggcctcccagagtgctaggattacaggtgtgagccagtgcaccagcctgtccttttattatgatcctacttaaatgcattctgaggaaaaaataagtaaatattgatactgagcccttcaaaaatgatgtttttggactgcattgtttttgtgttttatttactgacaaaaataattattggttggttagaaaggtaacttccaggatttcttttttttttttttttccagacagagtctcactctgtcgcccaggctggagtgtagtggcgtgatttcggctcactgcaaactccgccccctgggttcacgtgattctcctgcctcagcctcttgagtagctgggattacaggcgcctgtcactgcacctggctaatttttgtgtttttagtagagatgcggtttcaccatattctgcaggctggtcttgaacccctgaccttgtgatccatctgccttagcctcccaaagtgctgggattaccagtgagcaaccacgcctggcctgatttctaagttttataggaactacaggccgtctcaaaaaaaaaggccgggtgcggtgactcatgcctgtaatcctagcactttgggaggccgaggtgggtgaatcacgaggtcaggagatcgagaccatcctggctaatatggtgaaaccccgtctctactaaaaatgcaaaaaattagctgggcatggtgacaggcgcctgtagttccagctactcgggtgactgaggcaggagaatggtgtgaacccgggaggtggagcttgcagtgagccgagattgcgccgctgcactccagcctgggcaatagagcgagactctgtctcaaaaaaataaaataaaataaataagggaataacagcatctgataaattatggctgacaaatattgcaaaaattaaccttttaaaacatactgtgatccctgtcatttgtattactttgaggaataccctttttctttcctatccccagtttctcgatctttgggcatgaatgcatcagtgacaattgaaggaacatctgctatgtacaaactcccaattgcaccattaattatggggtcgcatccagttgacaataaatggtaagttaaatataattttagactagcaaagtcaatttttctcaaagtgcagcatggaacaagttttaacctggctcttaccctacttgaatttctagaggttggccttttgttttatccattcattgatttctcttttgttcgatatctgagtgttcctctccaaagtctgctcatagaacacattctctgcactgagagggaaagaagagaactgtgctaattcctctggtttaatgagtgcccccttttatcttatgttcatttgaagttacattggagtagtaactggagaacacgcctcaggataaatgtttaataaaatactacagcattaaccaatagcatgtttgggaatttggggaagtttcacagagtgagcttttgagagtttgtactcatgtgtctgtgtgatacatacatgtttaagaataggtgtttgtggccaggagtggtggctcatgcctgtaatcccagcactttgggaggcgaggcaggtggatcacctgaggtcaggagtttgagaccagcctggccaacatggtgaaaccccgtctctactaacaatacaaaaattagctgggcgtggtggtgggcacctgtaatcccagctactctcaaggctgagatagcagaatcccttgaacccgggaggcagaggttgcagtgagccaagattgcgccattgtactctagcctgggcattaagaaggaaactccgtctcaaaaaaaaaaaaaagggggggttgggtttttcattttcatacgaagtcaaaatccaacccttccaccctcttttttttgaaggaccccttccttctcctcaatcaccagtgccaacagtgttgatcttcctgcctgtttcttcttgaaatttccccagccaatcccagtatctagagcatttgttcagaaactgcagagctgcacaggtgagttttgagcatcaggatctagtatttgttataagtgtgaaaaagaaacttcaaagtcaggttatcgtgatgtctttcagtcttacatgcctcattgaagtattaactggtatagatgttatagtgctttgtactagtaaatgcttagtaagtagtcttttgggtgaatgaatgtagaaatcatgaaggggaaaccaagctgtcagtgttttcatcttaacatgatcattatattgattcttgtttttccaggaattccattgtttgaaactcaaccaacttacgcacccctctatgaactgatcactcagtttgaactatcaaaggaccctgaccccatacctttgaatcacaacatgagattttatgctgtaagtaaagccttagggagctagaatgttataggttatatttggacccaagatcataatcttcctttatagtattattgaggtcagataagtttcttcaagactgctggatcatgtcctatgtccttagtaaggcaagaaattacagaaatctcagaaatgggctgggcgcagtggctcacgcctgtaatcccagcactttgggaggccgaggcaggtggatcacgaggtcaggagtttgagaccagcctggccaatgttgtgaaaccctgtctctaaaatgacaaaatattagccgtgtgtggtggcgggtgcctgtaatcccagctactcgggaggctgaggcagaagaatggcatgaacccgggaggcagaggttgtagtaagacaagattgtgccattgtgctacagcctgggtgacagcaagactccatctcaaaaataaaaaagaaatctcagaaatgtactgaagtaaaagggcatgagcttccattaggaaataacaatgtacgtttctttgttgaaattttgggtgattagccaggcgcagtggctcacacctgtaatcccgggaatttgggaggccaaggcgggtggatcactagagatcaggagtttgagaccagcctggacaacatggtgaaacctcatctgtactaaaaatacaaaaattagccaggtgtggtggtacatgtctctaatcccagctacttgggaggctgaggcaggagaatcgcttgaacccgggaggcagaggttgcagtgagccgagactgcgccactgcactccagcctgggcaacaagagtgaaactccatctcaaaaaaaagaaaaagaggccgggcgtggtgtttcacacgtctaatcccagcactttgggaggccgaggcgggtggatcacgaggtcaagagatcgagatcatcctggccaacagggtgaaaccccgtctgtactaaaaaaaatgcaaaaattagctcggcgtggttgcatgcgcctgtagtcccagctactcaggaggctgaggcaggagaatcgcttgaacccgggaggcagagtttgcagtgagccaagatcacgccactgggcttcagcctggcaacagagcgagactctgtctcaaaaaaataaaaaaaaaagaataagaaattttgggtgatagactctttttttctttttctttttttttttttttttttttgagatggagtcttgctctgtcacccaggctgaagtgcagtggcgtgatctcagctcgctgcaacctctgcctcctgagttcaagtgattctcctgcctcagcctcctgagtagctgggactatatgtgtgctccaccacgcccagctaatttttatatttttagtaga

SEQ ID NO: 1055 - DNA, 32306 bp, Mus musculus
  source 1..32306: mol_type = genomic DNA
gcgatctttgggaagttccgttggggaagatggcggcggccgcgagcacccttctcttcttgccgccggggacttcagactgagccttccccggaagagtcggggccgctggtgcgccgcttccccggagcccaggctaacttggttcccctctgagtggcggggaaaggctccccggctcgtggcggacccaagacctccccgctgtcaggatgaaggctcagggggaaaccgagggtgagtgactggggggtggcggggaaggaggggcggtacaccgctgcggcgagccaatccgagagaggaggtggggacccacgcccctccagggccaccgtgcgtgggaccggatcctggtggaatgtgcatcttagatcccgaccgagccctacagatgctggagcgcctcctccggggcgctgctcccccgtctcctccactcgtgaaaggttttctgcgggacgagggacgaggaagttgagcctcagggtactttgagcttagcccggtgggacccaaggagagggaaactgaaacttgttgatgctttgttccaggagagatcgctgaagatgacactagaacaatgtaatgtcaaagtaatggagggtgttttagccggagtgacttgcttggttcgatcttcatcatagtaaaagcgggccgtttattacttggaaggtcatagtgttcaaatactgtgctgtgtctttacgaactgctttcagttgtgcacgaccggtggctttaaagcttgggggagaggtgttcagaactataaactggcaggaacaatccccaaaccagtttcccagttgagggaagaaaagggaagggatagaatcttctttgtttcttgagacaaggtccccctgcctcagcctcccaagtgcgggcttacacacctctcggccagctaagagtttgattcttggttcagatactccctcccacgacctggactggcttatccaaaaatgaagtctcgacatttgtagcaaagtggacgatactcaaaataagccatattaagataaatagcacattttctcttatgaggaatctcgacgtaggtatgtgttggtgtgtgttggttgtgaaaacatgggaccatgtgggaacaaaggaggtctgcaggatagaaaggttagtggaatatgaaatgaagtgagaggtttggctgtttggaggttggggcagtgtggctctcagagggagaggacttggaccaagtataatggcctatatgtataagaatgccaaaatgatatgcattgctttgtatgttaatttaaagataatttagaggctgggaatgtagagcagtggttagagtaatgtcttcttgtccatgggttcaattcccagcaccaaaagaaaaggaaaaagggagccaggtgtggtggcccacagctttaatcccagcacctgggaggcagaggcaggcggtttctgagttcgaggccagcctggtctacagcgtgagttccaggacagccagggctacgcagagaaaccctgtctccaaaaaccaaaacaaaacaaaacaaaaaaaacccctaattattttttttttaaagattttatttattatatatgtaagtacactgtagttgtcttcagacactccagaagagggtgtcagatctcattatggatggttgtgagccaccatgtggttgctgggaattgaactcaggaccttcagaagagcagttagtgctcttaacctctgagccatctctccagccctaaaacccctaattataataacgtcttccttaaattgtgctccaagtatatccttcaaggtgttgtgagcccaagggtccagtgagaaaccctgtcttaaaaactaacacgcaaagagccaactggtgatggttcctgccttagtcctagcacttagtagaaagaggcaggtggatccctgagtttgaagccagccagacctacaaagagacaagacagccagggaagctctgtctcagccgtacctcatagcggcacacacccataggaggctgatgaaaggagacaagaggatgccttagagcatagtctgggcaagcctgggaggtgacccatgtttataatcctagcacttcataggtagaggtaggagtatgaggaggtcaccacttacatttctttactaggaggtagggcatctaccatatccactgtgggctctggggcgtgaacccagactctcatgtttggcattgcgggtgcctctactcttgtagccatcttgtcagccctcaaggtcatggtcagctgggctgtgagagactgtctcaaaatggaagaaaaaaagcagggaggtggctggagatcgagctgagggtttaagagccctgtgcttttggcataggttcaggtttggttcccaggaaacacatgtccacgtagcaactcacaagcatttgtaactttagtttcaggagtctcggtgtcttctggcctccatgagcactgcacagacatgccacacatccatgagtcaaaaaatcaaaacaataacagcaacccttcccccaaaaaaacccaaaaaaatgcatacccaacatatttttttttgaaataaagaatatgtatttcatgtgtatggtggttttatctccctgtatttctgtgtaccaagtacatgcctggtgtccttagaacccagaagaggagagcagatctcctgggactggagttgcatgtgactgtgagctgccatgtgggtgctgggacttgaacccagaacttctgaaagagcagctagtgctctttaaaggatgcattgggcattgtagaactgttttgatgccagtacttaagaggcagaggcaggtggacctttatttgttcaaagccagcctttttagaccctaacaccagataaaacaacacaatgcatcggggcctggaaggtcccatgtactcatggtgaaaggtgagaactggctgcagaaagccatcttctgatccccacaggcactgtggccagtttacacctgtgttcacacatcacagacagccgggcatggtggccacgcctttaatcccagcatttgggaggcaggcggatttctgagttcgaggccagcctggtctacagagttccaggacagccagggctactcagagaatccctgtctcaaaaaaacaaacaacaacaaaaaaagacatcctcacacaaataataaacacagtctggtttggtttctagtagtattttcaatgttcgttttatatatgtggatggtttgtttgcatgtatgtctatgcatcgcatgtgtggccgtggaaaccagaagagggtgtcagatcccccggaactggaactggagttagaaatgtttgtgagctgccatgtgaatgctgagagtctcactcaggtcctctggaaaagcagcaggtgctctaaccactgagccatttctcccttggtttttattgttgctgtctgttttaagacagggtctcattatgcagaccagactggtcttgacatgacaaaggtatgactgcttctgtctcctgagttttaagatacaaggtgcatgtcaccgtgcctggcataaaaataaaatttaaagctatcttctaagctggacacagtgtgtacctgtagtcacagtgactcacgaggctagggcaggggcattgtcggtgctgaagactccaaggccaacaaaatggacaacttagtaagattctgtctccaggaaattacgttagacaaccttgtgtgttgtgtatatatttgagacttcgatttcctttgtagctcaggctagccttgaatttacaaacctcctgcctcggtgtctccagtgcacggatggaatttatgggtgagcattttcctagctggctttctttatgttttggagtacatttatataaaagtgctttgacagttcctaagtgaaatacaggggttcttttgtaggagaaactgtggaagtcttgatgtcagagtgtctaatggtggtttctgctttccgtcgtagactcagagaggctgagtaagatgagctccctcctggaacggctccatgcaaaatttaaccagaacagaccttggagtgaaaccattaagcttgtgcgtcaagtaatggtgagtattgggaaggtactgagaattactgcccagttgtacacaactcatgctgaatctttaaaggatgcattgggcattgtagaactgtagaaatatcactttcagttatgtctaaagaaattaattaaaaagtactttgtaaaaaaaaaatatttaagaagctagttgccaggccgggcttggtggctcacgcctttaatcccagcactcgggaggcagaggcaggctaatttctgagtaaaaaaaaaaaggagaagctagctcccgaatgcgcaagggttgctagatccaatgctgtgtccgtgcttttactcatcacaaaacagcatggtggtgttgatttccaaggccagctcaggaagaatgtgccttaggaaggaggtagcttgaattcccatccacagaggatttattctaggacctctcacagatcagaggcaagcaggtatctgagttcagggctagcctaatttacagagtggattccaggtaagcctgggtgacacagagaaaccctgtctacaaacaaacaaaaaggcattgtctttgcacactatttataaacattctcctatatactttaagccaatctttacattacttacaacgcttaacaatacaaataacatgactatttgttatgctgtgatgtttactgtcagtacagaacagtattcttttcctttttaaagattatttatttatttcatgtatgtgggtgcactgtctctgtcttcagacacaccagaagagggcttcagattccattacaaatggttgggagccaccatgtggtttctgggaattgaactcaggaggaattgaactcaggacctctggaagagcagccagtgctgttaacccctgagccacttctccagcccacagtgttttttttctatttgagaagcagtctttggtgtccttctctggccttgaacttgttttggtggaacaattgcgaaagctggcattgaatttgttgtgtatttcaggcaggctctgagcacccgtccttgttgtgtttcagcttcccaggtatcatagagtccttctcagtcattgtctcagtcagcgtcttctgtgtagcttaggttggccttgacattgctatagatctgaggtagtcctgctgtagcttcccaggtgctgaggtgacaattgtgtgccaccatcctgctctcttcagcctctctctggtctgtgtgaagtagggcctcattgagtctttaggttttagttttgtttttgcctttgttccgtctcgttcagtacccgttcactgttcatgtctttctctgtggtgcttctgaggggtgccccgtgcggtgctacttgaactactcaagtgggaggtggagcactggaaggcaggctggctgtgtgctaagtactccttcaagtcactcagccacagtcaaaggacagggatccacttggtgttggttctcttaggtttaacttttctatatataaattacactttaatgagactatttcgtcctccctataatttcaacatttttattaccatttatctggccaatcatcagaatattggctagtggaagaactaaatttgttaataattaataaggaactatatcttatagccaaggggtgtaattatttcagtggttgagtgtttgcctagcatgtataagacacagtcattcactagcatcggaggaagaataaaccagagccaaagcccctggacgtcaggctccatggcagtgcttgccactatgtgactttgagcaaattctgtaattgtaatctctgtgagtttgtttgctcatagaagcagatgatgctagtctgcttatctaagatgttttgctttgctttgctttgctttgctttgcttgagtgtgtgtgtgtgtgtgtgtgtgtgtgtgtgtgtgtgtgtgtgtgtgtggtctgcatggtctgcataggtgcctttgtaccctgtgtgttcctggtgctgtgggaggcatgagatcccttggaacttgagtcacagatggttgtgagcccctgtgtgggtgctgggagttgattctgagtcctccagaccaaccagttatccactgctgagcatctctccagctccttttccaaatagtttagttgtaaagatcaaatgagacagacatgaagaacctggcagtggtggcacacgccttttttttttttttttttttttttaatttatttatttattacatgtaagtacactgtaactgtcttcagaccctccagaagagggagtcagatctcattacggatggttgtgagccaccatgtggttgctgggatttgaacttcggaccttcagaagagcagtcgggtgctcttacccactgagccatctcaccagcccccgtggcgcacgcctttaatcccagcactctgagttggaggccagcctggcctacagtgtgagttccagcacagccagggctacccagagaaaccctgtcttgaaaaaaacaaacagaaaaggggggggggctagataatggagggtgaccttgaaatgacctttatctccatatccttcttccaccaaaagccctgagattacaggcaaaggccactctgactggtcactgtttgctggagattgaagttggggcttggtgcatgccgggccattgccctccattctgaaactatggattctatcagtaaatgcatgtgcatcctcctttagtttgcaactaaaaaagtacttttagtttttattttgttgttgttcaatagtttactgttttgaggcaggctgttacatattccaaactgttttcaaccctgtaattctcctgcctctgtctcctgagtgctggcatttgaagcttgcatcactcttccattacacttttttaagtacatttatttacctttaatacagaggcttattgtatagcctatgtgggtgcagtgaactaaactcaggtcttctagaacaacaagcactcatgattgctgatccatctctctccagcccaccctcttctgttataaaaagaagaattttttttttaaagattcaatgtcattatttatttgttgctcttaaagactcatttttgactggactcagacttagaagtagaagctctcagcgaggacagcctacgtctcttggcaatctgttcctggcgcttttctttggcttccttcattctcttggccaaaagtttagcatattctgcagcctcctccttgttcttcttagtgcgttgtttcttcagagcaatacatcggagtttgtgttgcaggacgcatggagtaacaagatgctgaatcttgggtgctttggtcctgggcttcttaccttctttgtttaagggcttcctgacaacatactggctgacatcatcttctttagagagattaaaaagctttcggattctactagctcttttaggtcccaaccgaggaggcacagtcgtgtctgtcagtccaggaatatccttctctcctttctttacaataaccaagttgagaacactgagattagcatccacgatgcatccgcgaacagacttgcgcttcctctctccagttctccttggtctgtaacagggatgccccctattcaacagcaggcgcactctgccatgggtcagagcaccgtgcttcatgggaaaaccttgcttgtcattcccaccactgatccggaccacataacccttccactcttcaccaagagcattagcggctacttccgtggccatgtgcttctcatagaagatgtggagcttgcgctcgtcaaccacctcgatgacagccggtggcgggaaaggagatgttcagtttcatcttgacacagctgaccgcctgggaggcgtcacgaaaaagaggccaaaaagaggatttttaaaataattacttcatgtgtgtctatctgttcatcagtttttggagacagtttctttgtgttgacttggctgtcttagaactcaatttgtagattaggctggcttggaatttacagagatcctcctgcctctgcctgctgagtgagagctgggattaaaggcatggccactacgacattttttttttttttctaaaggtttacttattttactttgtatgtatgggtgttttgtctctgtatgtatttggaccatgtctgtaccttgaggccccagaggtcagaacagggcatctgttgaatcccatgatactggagttacaggtgattgtgagcagcccttggggatgctgggaatcaaaattgggtactctgcaagggtaacaagtactttgttttattgttgttggttggttggttggttggttggtttttcgagacagggtttctctgtgtagccctggctgtcctggaactcactctgtagaccaggctggcctggaactcagaaatccgcctgcctctgcctcctgagtgctgggattaaaggcatgcaccaccaccgtccggcttgatagttggattcttaaaagttctaaacttcccccaagtttagcttagatgctagaattcctttttactatcatatcatattggtatggatatattcacttatatgaacttttcttcctttaggtagatgaacagaataacggtctataggctctttgggcttggtgctatacaactcaaatctcagaaagatggccattctaggctataagaggagttccagatcctgtcttaagaaagctaaaatagagatgcccattggacaggcaaactttatatgccccagtacaggggaacgccagggccaaaaaatgggaatgggtgggtaggggagtcagggggggatggggagggtgtgggggacttttgggatagcattggaaatgtaattgaggaagatacgtaattaaaaaaaaaaaaagaaagaaagctaaaatagttcgggctggtgggatggcccactggctaaggacttgctgccaagagttgtggcctgagtttgatatctagaactcatgttgtgggacgccgtgacagtttactctgacctccatgtgcccatgctcctttgtctcatgcatacaaataagtgttaggaaacaatcccccatacaaaagacaactgttcttaggaagtggaggccagaggatcagatccaaggtcatccctggctggcttggagccttgtctcagcgaaaggaaagaatctgtagtctaattgtactttagttctattagtaatttgacatctgtttacctgagacattgctatggttgatatttttacttaattcattctgtaatttgatacaggagaagagggtcgtaatgagttctggagggcatcagcatttggtcagctgtttggagacattgcagaaggctctcaaaggtttgtataaacctttataatatattgatcttaatactcacattaaggatttttatgagaaggccaacttataaattcaatagaaatataaattaaggtagatgatgactttctatgctagatgttgcttttgttttcatttatggagttgaactcaatttgttcctgaaacttgttcctgaatttgtaaattttttattgacttgtttgctttatgatttgcatgtgtgcgtatatgtgttgtatgcaaatgtgcatgtgtaacaaagctcatggaggttagaaatcgcttatgagtcagctttttctactgtacagtctgggacttgaactcagtctgtcaggcctgcaaggtaagtgcttctttccaattccaaaatgatctacctcattttgaatcatttattatgaatcatttatttttgagactgggtttcactctgtagccctggttggcctgaactctactgtgtagaccttaaattcacagagagctgcctgcctctgcctcccaagccaagggaccatggggttaaaggtatgcgccaccaagcctggcttgaaacaatgaattattacttactctgggcttttgagatagggtcttagtatttcaggtcaatctccttgtctatcctttgatctgaagatcttcctaccgcatcctcctgagtgctgggattgtaggtgtgtgctctaatacaggagtatacctttgtttatgatgcttggctgctatgtgcagggccatcagttctggtggggagggggagaaggaataatactatatctatactacctttttgttttattttttaatctgtttagattgatttattgtatatgtgtgaatattttgcctgcatatatatgtatgtgaactatatgaatatagtgacaatggaggtcagaagagagagagtcagattccctggaactggcattacagatggctgggaaccatcatgtgggtacctggagctgatcctgggtcatttgcaagagcaacaagtgctcttaattcttgcgcacgctccactggccaggaagaacgacgctgcaacaggatccttctgcacatgcttattgggagagcttgattgtagaggcgaaaagaccccaagccagaactggtgctgcttttataggcctaggaggggcgtgtctcacacccggattggttatgcactaagcctcatttgcatgttcctcatctgattggctactctctctcagtaccttacagaacctcattatcatacctcatttgcatgtctcacatctgattggttatactctcagtaccttacagaacctcattatcatgcctgggccaggcagtgtctttgcaaaaaactttactgcatatgtacacattggttgtttgtccaatcttatgcgtggtggccagcagtagtcagtgccactcagcaacggcacatgtggcttcccacacttaattgctgagtcacaactccagccactcccatcctgagtttgagacagggttgtatagtatccaggcaggccaaaacctccttatgtagccaaagatggcctgatcacctttgctttcttcagtgctggcactctatggatgatgccatcatggtcctccactgcttattcagccatctgttcatagacccgtggattgattttgtttggtgccagaagtcaaacccaggacagcacacatgctaggcacgcactcttattgcgcctcagcttccttgctgccatcttcattcttttgtttgtttgttagtttttgttgttttgtttttgtttcagagacagggtttctctgtatagccctgactatcctggaacttactttgtagaccaggctggccttgaactcagaaatccgcctgcctctgcctcccgagtgctgggattaaaggcgtgcgccaccatgcccggctcctatctttgacttttatgagtactgtgagaatcctttttttgttgtttggggagctaccagttgaactaaggggagttcacagcatgtaaagtacatgttcttgaaactgaatccaatcctttgggggcctggagggatggctctgtggttaagaactctggcctgtcttttacaggacttgagttcaattcctagcacccacatgacagctcacaactgtgtgtaactccagttccaggggacttagcatcttcacacagacatacatgcaggcaaaacaccaatgcaataaaaaatagtacagcctgggctcccttgtgttctcatcgttacccttctcactctagcattgacagcctaggagtcaacccaagaggggcaccattctgcctggccagctttgtattagttccatatgctttctcttagttaaagtgaccttgacccacataggtaataataaaaaaggagaaaaacatagtttggtagtatttctgttccctttttttttttttttgtctttttttgaggcagagtctcatagactagtctgacttgggaattattatataatgcagaccaggactggcataacaggtgtccattgccatgcctggtattcatatttttttgtctctctgtatcttgtgttttaaggcagggtttcactatgtggctaagctaaggctgaccttgaactcctgatccttctgcctctgaccacccccccccccccaaagtgttagctatcattatacaggtatgtgctagcacacctggcttgactctataattttttgtttgttttttctttagctatctatctatctatttttttaaattgtgacagaatttctttgtgtaaccctggctgtcctggaattcactctatagaccaggctgacctcaaactcaccaaaatccatctccctctgcctcccaagtgctgggatcagaggtgtatagttcagactcaggcctgcctctgcctctatagtgctgagattaaaagcatgcattaccagtgcaggctccataattatcaaatatatcttttatcttggtcacttttatttctgtgacaaaattcttaatcaggacaatttaaggatgaaggtttgactttttgcggagggtataagtcggagggtataagttggagggtataagtctaccgtgtggggaaagcatggcggtcagaatgtcaggtcacagtgaaccgatgtcagatgaatgctggcactcatgtgctcctcggtccttgtacttagtcctaaccacccatattcagagtgggtcgcttcagttagacctctttagaaacaccctcaaggacatctacagcagcatgtctccttggtacttctacgtccagtccaactgacaatgaaggttaagtaccacaatcttaatatcctcttaccacttgtcaccgtgtcctttacctgactactgggtcacagccaagcctcaataaacttgctgcagattataggtgtctgaactattgaatatgtttatggctttggatgggtagatatactccttcttttggaatattctttatgaatttctccccccaatccccattatctttttacagtaacatctttgccagcaatgactgatcgtttggaatctatagccagacagaatgggtatgtaattttatctgtgggcaaaaatgtacaacacagtgctaattttggggagctttctcacgtgtcttgtattaatctttgttttgatttgttcctgctagactgggctctcacctcagtgccagtggcactgagtgttacatcacgtcagatatgttctatgtggaagtgcagttagatcctgcaggacagctttgtgatgtcaaagtggctcaccatggggagaatcctgtggtatgtgttgatatttccctggaatctatggggtttacctaggaacatacttaaaaatgaattgttggggtgggtatagcttgtcttttagggttttttcatgagccactgtagagatgatgtgatgggccacactggtagttttagaataaagttgagaataacaggtctttctggtgtcaccaagggctttgcggaatagaagtaccaactatagccaagctcatagtaacaaactagagcttgggttgaacaagagaagttcagaatacagaaacagtctttcgatcccatcaaagtgattataatcctggcagacaatatgaacggtcctggagtagaaatgaatgtaaagtgtgtataaccgagcagttctatgtagattccagggatgatgttgaagaaagaaactactgactacctttataaatgattttatttgttttgattttaaaagtcccaccccacgtttatggttcactagtaggaaaggcttttgaggggctaggaagctgactctgggtagtgcctgaggacctgcacttgggtccttcccaccacgtaaagggtgtgttcataccccgggctagaactgctggggcaagcgagacaggcagggccgggatgcttgctggctagctaccttcagggaagcaccaagtctccaggttcagggggaccttgtctcagaatgcatggaggaggacagcgatagaggaggatggctgtggtctacacacacacacacacacacgtcagggctttctgtgctgttaatgtttttgttttgaagcatgtgctattaatataaaacttttcgatgtttttcattttgttaattaatttaatgctttaacctaatttctttggtttcagagctgtccagagcttgtacagcagttaaggtaagcagataacattgatatatttcttggcactgacattggcattgataaaatcctgttttctggagggaaaactcggacttgtggatttatttatttatctatttatttatggttttcagagacagggtttctctttatagccttggctgtgctacagaactcactctgtagaccaggctggcctcagactctctgccctctcagtgctgggtttaatggcctgtgccactatagcctggctgtgagtttattttctttttcttcttcttcttcttcttcttcttcttttttttttttaatttatttcttattgtaaacaagtgcactgtagctgacttcagccgcaccagaagagggcttcagatctcattacaggtggttgcaagccaccatgtggttgctgggatttgaactaaggaccttcggaagagcagtcagtgctcttacctgctgagccatcttcaccagccccgaatttattttcttgactttctgtctgttcctgtttatgattagaattgagttaacagagcctggtggtggtggcacacacctttaatcccagcacttgggaggcagaggcaggcaaatttctgagttgaaggccagcctggactacagagtgagttccaggacagccagagctacacagagaaaccctgtctcgggaaaaaaaaaaataaaaaaataaagaattgatttaacacgactttttgttcattgtttgaaacatggtttcatgtgacctagactggcttcagagctctctgtttagccaagtgtaatcttcaggtcccaatcctctctcttagatgttggaaatagaggcacaaagcttataatggacttgcaactagccttagatttaccatatagtctaggctaaccttgaacttttaatattctttaaacttgggctggagagatggctcagtggttaagagcgccgaatgctcttccagaggtcccaagttcaaatcccagcaaccacatggtggctcacaaccatccgtaacgaaatctgatgccctcttctggagtatctgaggacagctacagtgtacttacatataataaataaataaataaatctttaaaaaaaaaaaaaaatattctttaaacttatttaattcttgtttgtttgttgggttttttgaaacagggtctggtcctgaaccagactcaagctcacacaactctgcctgcctctgcctcccaggtgctggggctaaaggtgtgcacagcactatggctggcctttattttacttgcttttgtgtgcttggtattgaatccaaggttttgttcatgttagtcattttacattattcacccttcctccccaggccttgaactcctaaccctcctgaactctcctgtttccatttgtataatgctgaggttgtaagcaccctccatcacacccagtcttgagtgtgacaattttttgtttctttgtttgtttgtttgtttttttcgagacagggtttctctgtatagtccgggctgtcttggaactcactctgtagaccaggttggcctcaaactcagaaattcacctgcctcttcctctgctgagtgtgacaatttttacccctatgttcagtttctcacttcagtattataggtaatttttatatttttaaattcctttttgaggcaggattaccactggctggcctggactctctttgtagatcagattgtcctcaaactcacacagaatccacctgcctctgcctctggaacgccttgactaatggtgtgtgttagtagccctggctgtgtttgtctttttgaaacagtgtcttatctagtccatgctggcctcctgctcactgtgtagctaggacagtcttgaatgcttgatctcagacctcttttctctaagtactgaggttacaggtacgcaccacttcccagccttattggcattccgttgccaaagtgaatttacttgatatattgtgggtcgtttatcagcatccctggcctcttttttttttttttttttttttggtttttttcaagacagggtttctctgtgtagccctggctgtcctagaactcactttgtagaccgtgctggccttgaactcagaaatcagcctgcctctgcctcccaactgctgggatttaaggcgtgagccaccacacccggctgtcctcttctttctttggacttgacaaaagtatccactcaattgtgataatcaaaattatctggataaggactggagagatggctcagtgattaagagcaccgacttctcctttagatgtcttgagttcaagtgtcggcagtcacgtagttcacaaccatctgtagtgggatttgatttccctcttctgatgtgcatgaaggtagaacattcacatacatacatacacacacatatatatatatacacacacatacatacatataataaaatagttttttaaaagctgtggttcaattaaaacaaattatatgagctggagatgttaactcagtagtggagcattcgcctagtgtgtacacttggggattcagtttcttccagcatcacaacaatcaaaactatgtacatagatacatattgtatatttttattatatgcttatgtttatttatgtttatgtacatgtgtacactgcacgcttacacatacacaccttgacagatgtatgcaggacaaaatcacaactgggtaagaagtgctaaaagaatcatgggaattctttgttgatcaaaagtgaatagcattctaggcatggtagcacttgcctttaatcccagcacttaggaggcaggcagatctcatgagtatgaacacagcctgatctctagagtgaggagtttgaaggcagtgagtgagggctgttcaaagaaaccctgtctctggctaccccagtgctaccagtaaaggtgctcaccaacatgctttttcattctctctttctctctctctctctctctctctctctctctctctctctctctttcttccttttctttttctttttttttatttctttaatattttttattacatattttcctcaattatatttccaatgctatcccaaaagtctcccacaccctcccccaccacttccctacccacccattcccattttttggccccagtgttcccctgtactggggcatataaagtttgtgtgtccaatgggcctctctttccagtgatagccgactaggccatcttctgatacatatgcagctagagtcaatctttcttccttttctactttttttttttaaactcagtctggtacctgagttcataggacttaccactcacatcttagactggatcttgccaggtcagttggtctaatgtacccaatcccttacagatttgcccagagacttggttccatggtgattctaaatcccatcaattaacaattcagattaatctcatcacaaatcactaccattgaattggaaattgtataagaacattgactccaaaccattaatacaacattttcatttcaactttgagaaaaagctatgtccgtgtattacatataatctgtcacagtaaaagtagtagccttgacaacagtctgttatttttggttgcttttcctgccattttgatttttttccctttgaactgagtggaattcctgtgtttaaatttaaacccagacgtaagactttctggtaatttgaagaagttcatttttgttttgaatattgaacataactggatatcttagaaagacttcactttgaggaagtaggttttatattcaggctttttattagcagtttattatatttatagccaaatataccaaatttcaatctttaaaatgtttggttttttgaattatttattttatattgtatatgtgagtattttgcctgcatgtggacagttgtgagctaccatttgggtactgggaactaaacttgggttctctataagaacagcagaatttttaactactgaaccaggtctgtaaacatattttaaaaattgttatacagccagaccatgatggtggcacatgcctttcacctcagtactcgggaggcagaggcaggtggatctctgtgtttgaggccagcctgttctacagataagttctagggtagccagggctacagataaaccctgtcttgaaagaccaagaccaaaccaaaccacaagaaaagatgtaatatggtcaaatatattggtatgcatacatctgtaattatttccagtatcccagaggccagtgtaggggaattgttgtgagtttgagctttgggctatataatatcaggctagcctgagttacatagctctaccctatctaaataaacaatggggctggagaaatggctcagtggttaagagcactggctgctcttccacatgatccaggttcagttcctacatctgtatattactccagttgcaggggatctgacactcttacacatacatgcatgtatgcatacaaccaaaaatatcggtgcacataaagtaaaaatgagcgagtgaattaattaattaattaatggataagtaaataaatggtgatagtctaaaataagccatataaatattgcattgaaactcaccaagatgtgtcatcagaatattctagaatgagtgaatatttctggcctttacttggagtagattatgttaacttatgaatttgtgatattctaaaattaatttgtaaacttatttgaagggggtgatttataatggaactttatctttttttaaaaaagatttattttatttatatgagtacactgtagctgtcttcagacacaccagaagaggcatcagatcccattacagatggttgtgagccaccatgtgattgctgggaattgaactcaggaccactggaagaatagttagtgctcttaactactgagccatctctccagcccaatggaacttatctttacatcatatttttagtcacttagtatgcatggtgatagtgtgttagggaatatatctttttactgccactgtgctgttctgtttaaacgcttacagcattgagaataaactgtttagccttgttgtagctaatttgttttagacccttttttctttaagattaaaagcagtggagggggagggacagcatgggtgcatgtatgtgtgcatgcctttttgacttacttttttttgttttgtgttttgttttttaaagacatggtttctctgtgtagctctggctggcctggaactgaatttgtagaccaggctagcctcaaactcagaggattcatctgagggaaagatttatttatatattttatgcgtatgagttttctgcctacatatatgcctacatgacagaagagggcatcagatctcattatagatagttgtgaaacaccatgtggttcctgggaattgaactcatgttctctagaagagcagacagtgctctcaaccactgagccatcactccaggcctcttgctttcagtttttagagtttatgtgtatgaatgtctttgtaccatatgtgtcctatgtctataccccataagtactgagtgctatgggggccaaaatagtctaccagacgccttgttggtggaggtgcagacagttgtaggagcttctcgggagcagcagccagcactgggaactgtggagccatctgcaacccagcttgcttttcttcctttctagattaactatacgatttatgtggatagaggtgtgagcagattattaaatgagtttggatagccatggtttttgtagaataaagtagtaatttcttgttgtattttctctttccccaccttcctgaattcccttatagggaaaagaattttgaggaattttccaagcatcttaagggtcttgttaatctgtataatctcccaggggacaagtaagtcatttcatttactcatttgctttccgttttggaaaaaggagtatgagtctgtgagccagtttgggttatacatacctttctgctgtatgtttatttaatttttattgtctatttttattttttaaagaagtatttatttgttttatgtatatgagtacactatggctgtcttcagacacaccagaagagggtgtcagatcccattacagatggttgtgagccactatgtgattgctgggaattgaactcaggacctctggaagagcagtcagtgctcttaacccctgagccatctctccagccccttaacttttaaatgtttattttatgtatatgggtttttaaaaattggtttggagttttttgtttgttttagttttttgtttattggttggttttgggcggggttgttcgtttgttttatctccatatgtgccttgtttatcagatctgtacctgtgaaggtcagaatggactgggaattgaacctgtgtcctctgagagagcagtcagtacttttcaaccattaagtcatctctctagtcctttttttttttcagagctgaggactaaacccaggaccttccactctaccaccaagcgctctgccactgagctaaatccccagcccctctagttcttaaagtattttatttttaacttttttctatctcctaaggtttttatctgaaaatggacatgtctgcttttaatgacttaaaatttgagaagatagaacacaattgttgaaatatcttcagtgtgttgatttcatggattctgttaaactgctttactcttttaaaggaaaatatatgtaaactctggtagtcctcccccgcccccccccccaaaaaaaagtatattagcccaggcttgacctcagtatgtatttgaggatggccttggccttgaatttctcagttccttttttatcccatgtgctgagattatcctgtttgatgggatgtccatctttgatagtttgtattttatttatttcactttttataatgagctctcactgtgtaactcctagctgtcctggaacgccatgtagatcagctgagctcaaactcctggcaatctgcatatctctgcctcctgagtgctaggattaagtaaggttgtgcaaaccacaccttgttttttaactttttttttttttaagagttaaaatagtttaattggttctaaccacctagtcagtattttttggttttcttgttattattgttttgagacagggtctcactgagtaacctcaactggagtagaattgctttgtagactaggctagcctgaccttggtgagatgagcttgcctctgcttcacactgactggggttgaaggtgtgtgccactatgcctggccagtgacagtgcctgtatgtgcttatttaattcaactgtttaactcattttcttctcatctactctctagcaaactgaagactaaaatgtatctggctctccaatccttagaacaggacctttctaaaatggctattatgtactggtaagactggctgatgaggccattctatgactcttagtttctcctccaggggatttttaacatcttaatttttacacttataggtgtactacagtatatgcgattacatatctttgcatattactgcgtatcatatgtttgcattatacgtgtttatacacaattatgatttgctgttgcttcaaaatgagtatttattacattgtattttctgagtataacaactcagaaactcattgataactgagatagttcagttattgctgagttgttggttgttattctatagactatatctgaaatattttcaaagttgaattgattatctgatagttatctagatctaatattttattcattaatttgagattgagtgtctctaggactcccagcccggctgacatgtaaggtgcagcagtgtcagccactccggttacagaattacgggatgtgcatacatttacgggatgttgtacatttcactgtatctcacactgatggttacaggaaagcagccccgttcatggacagtgagagcacatcttatgtgtgcagttacaagcggaagttattttgatagtagtataaaactttatgaccttagctctgtatcagacttttactgaaactgtcagtggctaaatccagtcacacatagattatttgtcttgtaggaaggcaaccaacgccgctcccttggataagattcttcatggaagtgttggttatctcaccccgcggagtgggggtaagttagcctttcttaatttccttttcctttctttcttttcttttcttttcttttcttttcttttcttttcttttcttttctttttttttttttaagaaaatgtatggaattagtttaaaggctattttattttaacatggatgtgagtgtggtgtgcatatatgtgtgggggccagagtaggacaggcagcctaccctgccattctgctttagtcccttgaggcaggatttctcagggatcctggacctaggctggcatcccgtaagcaccagttagtgatcttcctgcctctacccagcacggtgctgagattacaggggttagactgccatgctaggctgcttgtgcttagcacgctgaccagggagccgtctctccagcaccctcacttccttttttgttcttttgcagtgctgggaatcaaaccagagctctgtgcattctaggcagatgttcaccgcagtatatcactttttaaaaaaaaatttatatttttactttaggtttgtgactatactgtacctgtcttcagacaccccagaagagggcatcggatcccattacagatggttgtgagccaccaccatgtggttgctgggaattgaactcaggacctctggaagagtagtcagtgctcttaaccactgaatcatctccccagcccattttttgtttgtttgtttgtttgtaagatttatttgtttattttatgagtgctctattttcatgtatactgcatgccagaagagggcatcacatcccattacggatggttgtgagccactatgtggttgctgggaattgaacacacgacctctggaagagcaggcagtgctcttaaccgctgagacatctctccagccccaggtatatcacttttaattttaccttgagcttgtgaagacagaagctcaataagaaagtgaccattaccagtcatttttaatgacttctaagatgttaatacttttccttgttttctttgtgtgaagtatattgctgttcctagaatcaataaacttttcataagcttatttaggactttgcatatttgtgcaactctttgttttctattttattacatttatcttctttctgagtgtgtgtctttttaagtatgtggaggtcagagtcagttctgtcctagcataaaaggtccttgggaactcagctgtcagacttggtagcaggtgttcttgttggctatgctatctcactggccctatcgagttaagtgtgtgtgtggtgtgtgggtgtatgtgctcgcccgtgtgtggagatttaggaatgtatgtgtgtatgtttattaagaagtattaaagctttttgtaggcaaggtaatcactcttctctgagctgtccccagccttttcttgttagtttaagatgaggtttctttataggtgagtgccaccacaaatataatgaatgctttttttaaagtatataatttattaataaagatgccttaataacttttattaatgataggtcatttaatgaatatgaaatactatgcctctccatctgacctgctggatgataagactgcctctcctatcattttgcatgaaaagaatggtaagtgtgtgttgtttatgtactttgaggcagatctctttctgtaacctaggctgtcctggaactcactatgtaacaaagggtggctgtcaaacttatgtatagtgatcatatatatcacttcagccttccaagaactgagagtatagttatgaactaccattcctagctagatatggttttttgagacaggacaacctctacctcccaggtggtggagttacagcttgtaccactatgttcacctttctctgatgtgttaaaaatgttggtaaaattcaactgcccagtctccccggctaatattcatataatgtggtatttcttaatttgctatctttatgtatgtatacctgatataatacaaacatgtcatatgtacgtgtccatatatatcttacatatatacgtgtatatgtatttaagcactcaagcctatatataatattagcttagtaagtaaatgagtcactgatgaaatatagattactgacaaatacccagcttccttattacgctaaaggggaagaaggctgggtttggtgggacatcccagagtgcccacagtgaggttgctcaggcagggaaacctgagtggaaggttaacttaaactacatggtgacacttcctcaatgattaagtaaataactatgacttaactgcagtaatgaatgacacttggtgttttaactttctgctcttggtgttttgagacaggaatgtcatatggccacacctgggggttggggggaggcagagtcaactggtctcagatttgttatataaccgaggatgaacttgggactctgttcctcttagttcttgtatacaccaccaaacctgcttgtgtttggactaatacagcaaaagaacagaagaactagcccaggactttacttgacctcagtatagcttcaatcattgtcctgaaattgtaagctcatttaaatacattgtgaagttgtgaatgaaagtaaaagttgatagtgagctctttaatcattagcagaaagaaatactgattgttatggtgaggtagcttgtagtcctcccccctccccatttttttacacctttgggcaggaattgattcaggatgacataggagtgcttgctggcttgttccttatggcttactccacctgcgtccttttctttttttctcttttctttatatttatttcacttgcatttgtgttttgcctgcacgtatgtttgtggaagtctgagaccttgagttgcaaacagctgtgagctgccatgtggttgctgggaattgaaccagggacctctgggagagcaaccagtgctttttaaccactgacctatctctccaacccaagcttgtaacatttgtgatttttgtgggattagagtatgtagattcatggtgactgatactgtacgggtttcttctgcatgttagttattggttgttgttgttttgattcttttggaaaataatgtttctcctcaggctggcctcagacttactctgtagcccctgcttatgtgctgcctggcttttcttttttttcttgtgctttgttctgtttttgaaactgggtctagccttgtagctcaggcaggcctctaactcaggtccattttcctttcttgttctgcagaatgctgggtttgcacacagggccaccatttctgtctttttagtgctgagatccttgtcctagttatgaggtagaaaatctttttttctttttctattcccagttcctcggtctttgggaatgaatgcctcagtgacaattgaaggaacctctgctatgtacaaactcccaattgccccattaattatggggtcacacccagctgacaacaaatggtaagataaagatagttttaaagttgtgtcgtctattttctgagctgcaaccccagtgcgtttatctttctgggatgttcggacgtcgccctctgcttccatgcatgcacgcctgtcctatactggaatgtttctacttgaggcctactcagagaacacacattgtcacacatttgtgttttttttattctgtgtatgtatattttgcctgcaagtgggtttttgcaccatcctttgtcctggtgccctcggaggctagaagcagccatcggatcccctggggctgcagttacagatggtataaactgccatgtgggtgctgggaattgaatacaggtcttttagaataccagttagcatcattaaccaccaggttaatatattccctatagaccacattctttgttctgaataaattagttggagttttatattggtttttgtacccagggctacaaataggaagtgtattctttcatactgagctagaccctgagccccattaaacatatattttttaaatacttcagaattaaagtatttgagaataaggtaatatattttggaattgtggtcaggatagtagaaaagtaagcttttgatagactttgtgggtctatgtattatattattgtctaagaaaaagtgttcatagtcttcaaaatagaaaatatccccctcttctttttttgaaggaccccttctttctccgcagtcactagtgccaacagtgttgatcttcctgcgtgtttcttcttgaaatttccccagccaattccagtatctaaagcatttgttcagaaactgcaaaattgcacaggtaagctttgttttttaaaatgtttgccagcctttaatagaggtaggttttactcattgagttaaaacttgttaaaatcagaatgaaaaacttcagattatcttaaacaatttacagtcttttggcttcaaagaagtgctgctgagtacagcttttaggaaagtactagtagttagtactggtagttagtactggtagttagtactggtgctctgtaagaacttttggagatgtgggcagatgcataggaagatcacaagaagacagtgcagctgtcacagtttgatcttacgtgagcgatacaaacagtccttgtattttcaggaatcccgttgtttgagactccgcccacttacctgcccctgtatgaactcatcactcagtttgagctgtcaaaggatcctgaccctttacctttgaatcacaacatgcgattttacgctgtaagtaggccctgtggacttgcaacaatgttgtttctctatagcactagtgaggtccctccaatagcttccttttagattgctacatcatcctcagttgggcaaaagaagtcatcataaacatgctaaagcagaagagaatcagcttttgagttaaacagccatgtacatttctgtctgtttgtatttgatgtgcatcagtattttgctatatttaagtatatacataacctgcttgcctggtgccaaagaagtaagaaggtcacctaaactggagttatgtacatctgtgagtggccatgtgggttctggtaactgaagctaggccctccggaagagaagctgtggctgtaaagcaaggagcattctttcatgtccttttccttcttcttcctttcttccttcctttcttccttcctttttttttttaaggatgtatttattttgtgtatatgagtacactgtatctgaacagatggttatgagccatcatgtgcttgctgggaattgaactcaggacctctgttcgctctggcacaaagatttattttattattatatgtaagtacactgtagctgtcatcagacacaccagaagatgacatcctatctatggatggttgtgagctaccatgtggttgctgggaattgaactcaggacctttggagaaacagtcagtgctcttaaccaccgagccatctctttagcccttccttcttctttctagacaggttctcatgtaacccaggctgccattgaattttagcaagggtgatcataaaccagtcctctagattgctgtgacaataggcatgctgagaagtatctacagagaaatccaggactggtggaacatggcatttgggaagtggaggcttaaggattgccttgacttaggagtagcaaaaccttttctcaaaaaagcaattgggaaaaaaatcagaattggaaatcttttaatgctatcttgaactcttagaaggctgaaagatactatgaattttgttttgtttttttgaggccgtggtggcacacctttatcccagcactcatgagtcagaggcattcgagcaagttctatgataggcagggctatagagagaggctcttaggatttccattgctgtgaagacaccatgaccaaggcaactcgcataaaggactacatttaattgggcctggcttacaggttctaaggtgcagtccattatcgtcatggtaggaagcatggtagcatccaagcaggcatggcacttgtacggtttcaaagcccaccccaatagtggctctcttcttccaacaaggccacacctcctgttttaaaccaccacagaaagcggtgagacctgtcttaaaagggggaaaatgtttccttggtttttttgttttttgggtttttttgtttttgttttttttttcaagatggggtttctctgtaatgccctggaactcactctgtagactaggctggcctccaactcagaaatctgcctgcctctgcctcacaagtgttgggactaaaagcatgtgccacaactgccctattttgtttccttttactttaatatttttatgtctatgagtgctctccctgcatgaatataagtgtactattgcatttgtgcatacatgaaggtcagaagaaggtgtcagattctcctggaattagagttacagacggtttgaactgctgtgtgaatggatgggtgctgggaaccaaatctaagttgtctgacagagcagtacagactcttaactactgagctatctcttcagccctagcccattaggtgctagaatgagaaaggccttttaaatacatatggagaacaaatgctgccgcacataaaggacgaaaggtcccaaacctcatctgggtgtaaattgcataggaatgcatagtttatacaacttccaagctctctagttgcagctaaagtataattatatagatttttttttaagatacagctttgtaattctttagagactgctagtgtaaatttctaaggtggtttttgttttagctaagttaggaattcacctcaataatgcattcataaacaagtatcttttagctaaagaataactagttggcattcataacatcagttgaaagaggtctgtatagctaggtaacgtttactacgtcccatactttggtattcctcctgcccactgcaggatagtctgtggctgggcttggtacactggtgagtaaataccattcatttgcattcctcttttgcctaggctcttccaggtcagcagcactgctattttctcaataaagatgctcctcttcctgatggtcagagcctgcagggaacactggtcagcaaaatcaccttccagcaccctggccgagttcctcttatcttgaatatgatcagacaccaagtggcctataacactctaattggaagctgtgtcaaaagaactattttaaaagaaggtactctctttccttctgatcaacttactgggagatgggtgctcacttctccagtggtttggttatagtttattgaaacaacacccagatggctttagagaccacaggtatttgattccacatccagagcaaaagaattagaattagaatgtcatcgtaaacaaaacaagcacaatgaggaatttagtttagtcaccattaattattttgagggaactaatttgttacaattgtcatttatagtaaaaatcattgtcactggtgtgtgtgtgtctgtgtgtgtgtgtgtgtgtgtgtgtgtgtaaagcagttctctggatttacattctgtttctttttgcctgaaacttcagctgatagatactgactgtcttgtctatgagatttaaccgtttctattgatttgtttttattcttgaaatgggctcactgtaagacaggctagccttgaattcattgttttacaggttagtcttgaaattgaggtgatcctcctgcttcagcctctcgtatgttaacgtcaaggtctacactacccttcctgattacttcttctaaatagtgacataactagctagtgtgtcttctttctatcttagtgcactgagatagatttgtctaaatactacagtttaggttgttatgtgtggtagatttagcctttaaaataccatcccactccaccccattctttatagaatttggtcatatatctttaaaagtctaagatctatgaccctttctttttctgtctggattttaaagggatactttttaaagacaattggctacttgaagctttgatgcagattttggctactcccatcgatcagttagtttccccaggtcatacagtgttccagtgatggttatgtattgttaaatatctatcagcagaagtttaggcaacaagaaacagaatggaaatccagagaactgctttagaaagatggttttgagacaggtattcagatacccctagataagattgaactgggtgttcaggtaaagctgctcttaaactcctcgtccttggggctggagagatggctcagctgctaaaagcactgactgctattctagagttcaattcccagcagccacatggtggcttacaaccacctctaatgggatcggatgtgtctgaagacagccacagtacactcataaaataaataaatcttttttaaaaaatttaaaggggctggtgagatggctcagcggttaagagcactgactgctcttccaaaggtcctgagttcaaattccagcaaccacatggtgactcacaaccatctgtaatgagatctgacctcctcttctggggtgtctgaagacaactacagtgtacttacatataataaataaacaggtttaaaaaaaaatttaaaaatgagcattagaaggaaaaaaaaacttgtgtggatggtgtatgtgtgggtatctgtgcctgtgccactagaatgtttgctagataaccaaataaattttaaaaagaaaaaaaaaacaaaactagattgcctggtgtggaatctggtgtgttcatgtttcctttaatccaagtatttggaggcagaggtaggtagaactctgagctacacagagagaccctttctgaaaataaacaaacaggttaaagttgtagcatgtaagtacagttcttgcctaccactggtgaggcgttgggttgtcagccctgcaaaaaaaaaaaaaaaagcaagtctaaaacaatatccaaaacgaatctgtaatacatgtgtattatgtgtatgtacatgtatgtggtctcagcgcatgttggtgttttgtttggttggcttatgtattcctgtagaccaggctggcctgagcctcacagagatccccgagtttggtggaaggtggaactctgggatactgagaccagcctggcctacagagtgatttccagaagagtcagagctacacggagaaaccttgcctagaaatacttaacaaacaaaatgaaaatcggtgttactcaggctaatgttgtgcatgactgtatgccagcactagataggaggcagaagcaggggcaggtagctctagacagacagtgagggtcagccaagggctgcaccgggaacctgcctcagaaaccaaccaaaccacccttactgaggaagttttacggtaatagtactgattggccacatcaaataaatgaaaagactaattgagagctgggcatggtcgtgagtacctgtaatctcagtgttagagaggctaagacgggatttggggttcaagagtaacctgtgctacacaagactatgtcataagttacaaaatgaaacaaaagtcttggccattcctggtttcagaattcactctcaatttaggctgtttactaattttttgtttttaagtttttctatgttgtaattattttatattcatgaatgttttgcctgcctgtatgtatgtgtaccttgtgcgtgcctggtgatcaactggcgatgttactatttgcataaagacaattatttgtttgtttaatgtcttaaatatggttatgatctttttcctcattgttcagattctcctgggctcctccagtttgaagtgtgtcctctctcagaatctcgcttcagtgtatcttttcagcaccctgtgaatgactcccttgtgtgtggtgagttgtgtgggtggccagcctctcttggggacatcctttcttgaaaaattgagaacccggatggatcacaaggatcacttccacattttgtctttcagtggtgatggatgtgcaagactcaacacatgtgagctgtaaactctacaagggg

SEQ ID NO: 1056 - DNA, 32306 bp, Rattus norvegicus
  source 1..32306: mol_type = genomic DNA
cgattaatctcgcgatctttgggaagttccgttggggaagatggcggcggccgcgagcacccttctcttcttgccgccggggacttcagactgaaccttccccggaagagtgggggccgctggtgcgctgcttccccggagtccaggctaacttggttcccctcttagtggtggggaaaggctccctggcttgtggcggacccaagacctcaccgctgtcaggatgaaggctcagggggaaaccgagggtgagtgactagggggtgggggggaagaaggggcgggacacaactgtggggagccaatctgtgagcggaggtggggacccacgccccccccgtccccccagggccactgtgcacggaactggatccaggtggatcctgaccgagctttacggatgttggagctcctacactgaggctccgctccgcctcgcctccccttgtgaaagattttctgcaagactagggacaagtagatgagcttcaggttactttcagcttagcctggtgggttaccaggagagtgaaactgaaacttgatgctttgttccaggagagatcgctgaagatgacactagaacaatgtgtcaaagtgatggaggatgttttggtgtgagtgacatggtgcggtctttattataataaaagctagtagtttcttggaatgtcatagtgttcaaatactgtgctgtgtttttaaaaactactctttcaattgttcctgaataatggctttaaagctcgggggaaatgtattcagaactatgaactagcaggaacaaaacccaaaccactttcccagttgaaggaagaaaagggaagggattgagtcttttttgttttctttcaagacaaggtcttcctgcatcagcctcccaagtgccagcttaacataccatcatagccagctaagagtttaaatcttggtttaactatccccctcctaaccttaactcagatagactggcttatccaaaatgaagtctcgacatttttaggaaagtggacgatactcaaaataagctgtatttagctaataccacattttctcttatgcggaatctcaatttaagtatgtgttggcgtggtgtactggttgtcaaaatatgggaccatgtgagaaagaaggagatcttcaggatagaaaggtaaatggagtttgaactaaatggaagccttgactgttttgaggttggggcaggggtggctgtcagaggaagaagactcagacccagtgtaacatcttacatctataagaatgccaaaatgatacccattgctttgtttgttaatttaaaaataatttagaggctgcagatattagagcaaggtcgtttgcccacaggttcaatccccagcaccaaaagaaaaggaaaaaaggagaaagcaacaaaaatgaatgatgtcattgttttcatactaaaaactaattatagaaatgcctagctcaaattgtgctcaaaatatatccttcaaggtattgcatccctatgtatgcaattacaagttttttgtttgcttcagtggatagtttgaacagaagctgggcattgcatacctgtagtctcaccactgagaaggtagaggcaggaggggcaggacttcccgactgccctttccttctcagcaagttcaggctcatttaggctaagtaagaccttgtccagaaaaaaaaaaaaaaaaaaaggctgccagtcagttggtaaaatgcttcctgtgcatacatgaaaacaggcctgaatttggtccccaagtggtgatgattcatgcctttaatcctagtacttagtaggcagaggcagggggatccctcagtttgaagccaggcaggtctacaaagagacaggacagtcagagaagctctgtcttaaccccaaccccccaaaataaataaaaaagaaggcgtctgggggctggagagatggctcagtggttaagaacactgtctgttcttccagaggtcctgagttcaaatcccagcaaccacatggtggctcacaaccatttataatgatatctagtgccctcttctggcctgcaggcatacatgtaggtagaatgctgtatacataataaaaagtcttaaaaaaaaaaggcgtctgtttatagtggcatacagccataggaggctaaagaaaaggagacaagagatgactgaggagagtctgggctgtaatgcaagcccgggtagagggacaagcatgtggaggccaccccttatatttctgtatttggaggtggtctactgtagctactgtgggctctggggcgtgaacccaggctctcatgtttggcatgggatgcctctactcagggagccaccttgtcagcctccaaggtcatgctcagctagatggacttgggggtcagcggggtggcgagagaatgtctgaaatgaaggaaaagcagggaggggctggagacagagctggggagtttttggcatgggtttagatttggctcccaggaagcacatgcccacagggcagctcacaaccatttgtagctttagtttcaggagtcttggtgccttctagcctccctgcacagacgtgttatacatgcatgagtcaaaaaacaaacaaaaaaccaaacacacacaacataaatctttttttctttaaagaatatgggtttcatgtgtgtagtggttttgtcttcctgtatttctgtgtaccaagtatatacctggtgccctcagagtccagaagaggacagcagattccctgggactggatttacatgtggccgtgagctgccatgtgggtgatgggacttgaacccagatcctctgaaagagtagctagtgctcttaaaggatgcgttaggcattgtcaaacagtactttgatgccatacttaagaggcagaggcaggtggatctatttgttcaaagccaccctttttagaccccgtctaacaccaaacaaaacaacaaaatgcatctaggcctggaaggttccacgtactcatagggaaaggtgagaacaggctgcagtaaaccttctgacctccacaggtgctatggccagttcacacccgtgcttacacatacgcagataacaaacacagtctggtgtggtttctagtagcattttaaatatttgttttacatatgtgggtggtttgctagcatgtatatatatatgtaccacatgtgtgcctggtgcctgtggaaaccagaagagggcatcacatcccctggaactggagttagatatgtttgtgaacttctgtatggacgctgagaatctaacttgagtcctctgggaaaggagcaagtactctttttttttttttttttttttttttttgggatctttttttcggagctggggaccgaacccagggccttgcgcttcctaggtaagctctctaccactgagctaaatccccagccccgagcaagtactcttaagcaccgagctatttcaccctgggtttttattgttgctgtttgttttaagacaggctcttcttatgcaggccaggctggtcttgacatcacaaaggtctgactacttctgactcctccgagtgttggattaaaaggagcatgtcaccatgcctggcataaaaataaaatttaaagctattttctaagttggacacagtgtgtacgtgtagtgacagtgactttggagtctagggcgggggattgttgggtccgaagactccaaggccaacataatggacagcttagtaagattctgtctcaggaaatctctgtgttgtatacacatttgagacagtattcctctgtagctcaggctagccttgaatttacaaaccacctgccttagtatctccagtacagggataaaaagtatgggtggtcatcttactaggcagctttctgtatgttttggagtaaattatataaaaaatacttggacagttgtaagtgaaatacagggtttcttttgcaggagaaatggtggaaggtcttggtatcagagtggctgctgatgttttctgctttacgttgtagagtcagagaagctgagtaagatgagttctctcttggaccggctccatgcaaaatttaaccaaagtagaccttggagtgagaccattaagcttgtgcgtcaagtcatggtgagtattgtggctcagtgggtaaggtactaagaactacctaaggaactggcctctcccccgtaagggttgctagttccaatgttgtgtccttgcttttgctcaccacgacaacatggtggtgctgatttcagaggccagctgaggaaggaagtgccttaggaaggaggtagcttaaattcccatatcctcagaggtttcattctaggacttctcccagatcagaggcaagcaggtgtctgagttgaaggctagccttgtttacagagtgagttccacgaaagcgtgggctacacagagaaactctacctcaaaacaaaccaacaaaaaggtactgtctttgcacactatttataaacattctcctgtatactttaagctgatatctacattacttaaaatgcttagcaatacaaatagcttgtgagtatttgttatgctatggtgttcactgtcagtacagaacagtatttttctttttttttcttttttcttttttttttttttaagatttatttattcatttattatatataagtacactgtagctgtcttcagacacaccagaagagggcatcagatctccttacagatggttgtgagccaccatgtggttgctgggaattgaactcaggacctctggaagagcagtcgggtgctcttaaccgctgagccatctctccagcccaagaacagtatttttctattagagaagcggtctttggtatccttctctggccttcaacttgatttggtgaagcagttgggcacgctggcattgaatttgttctgtcgttcaggtaggctttgcgcaccattcttctgctgcagcctcccaggtgacctatatcatatggtccttttcagtcagggacttctgtgtagcgtaggttggccttgaatttgctgtagatctgaggcagtcctcctgctgtagtttcccaggtgccgagatgacagctgtgtaccctgctctcttcaggttctctttggtctgtttgaaatagggtcacattgtgtcttttggggttgctgttttgtgtttgcttttcttacctcttgtttggtacccatccactgctggtgtctttctctgtggtacttcttccctgagtgggccccagtgcagtgttacttgaacgacttaagcagaggtggagcactggggaagcatgctggctgtatgctaagtattcattcccaccactcagccacagtcaaaggacagggattcacttgtgttttagctttcctatgtataaattacactttaatgagaatatttcatcctccctatagtttactttaattccagggtaagtctacttcaacatctttattaccctttatctggccaatcatcagaatattggtagtgtaagaataaatttgttaataaggtctgagccaaggggtgtaattaattcagtgggaaagcgtttgcttagcatgtataagacgcagtcattctctagcaacagaggaaaaataaaacaaaaacaaaaaccctgtactttagactccttggcagtgctgctgtgtgactttgaacaacttatgtaattgtaatctctgaatttgtttcctcatgggagcagatgatgctagtttgcttatctaagacgtttgtttttgttttgattatgtgtgtgggtgtttttctgcatgcatgcctttgtaccctgtgtgttcctggtgtccattcagtcatcagatccttggaacttgagttacacctggttgtgagccactttgtgagtgctgagaatcggttctgagtcctctgtgagaccaaccagttctctactgccgagcatctctccagctccttttccaaatggttttggtaaataatggagataaacaatggagggtgaccttgaaatgacctttattgccgtatccccccccacctcggagtgctgagggttcaggtcaaggctgctgactgatcactgtcttgctggagattgaagtcaggcctttatgcatgctgggccattgtcctgcattctgaaactctggattctagccataaatgcatgtgcatcatcttttagatttcagacaaaaaaagtgtttttagttttttctttttgttgttccatagtttgctgttttgaggcaaggtctcatatatcccagactgtttccaactgtataattctcctgccctggtctcctgagtgctggcatttgaagcttgtgtcactttttcttccattacattttttttttttctttttttcggagctggggaccgaacccagggccttgcgcttgctaggcaagtgctctaccgctgagctaaatccccaacccccccattacattttttaaagtacatttactttttttttttttttgggttctttttttcggagctggggacagaacccagggccttgcgcttcctaggcaagcgctctaccactgagctaaatccctaacccagtacttttactttaaaaggtaaaagtatttaccttgaagacagaggcttactgtgtagcctgagtgggtgcaggaaactagactgaggtcttctagaacagcagcaagcactggtggtccatctctctagcccacccctccttttgtaaagatagctttttaaataattattttatatatgtatgtctattaactagtttttagagaccgtttctttgtggagccttggctgtcctgtctcactgtgtagaccaggctgacctggaacttagagcgatcctcctacctcagcctgctgagagctgagattaaagaaatgtgccaccacaactttagttttccagctttacttattttactttatgtgtatggctgttttgtctttgtatgtctgtgcacatgtttgtaccttgaggccccagaggtcagaagagggcatctgttgaatcccatggaactgaggttacaggtggttgtgagcagctttgggggtgctgggaatcaaacttatgtcctctgcaagaggcctttatacatgctgggccattgccctccattctgaaactgtggattctttcttattttctgaatggctgtgcaatacctccagtccttttctttctttctttcttgttttttttttttttttttttttttggtaagaaagtctcatgttgctcttgctggcctggaacttcctgtgtgtagaccagactggccttggcactcactatgatttacctggctctgccttcaaaacactggggttaaaagtttgtgccaccattccttgtacattaatttatttttatttctgtttctgagtgtttgcctgcatgttggaaatcctgataccaagttacaggttttgaactagatgtggatggtaggaactaaaccctggtcctttgcagttacagctagcgtttttaaccaccgaaccctctctagcatcccaaaaaaacatcttttaaaagtgatttaaaccaggcagtggtggcacacacatttaatcctatcacttgggagagaaaggcaggtagatctgagtttgaggccaactttatctacagaggctatccaggataggcaggactacacaaagaaatgctgaaaaaagcaaaagaaagcaaacgtgtatctacatctctgtctcttgtgatttggaaactcattgccctcttctggccttcatgggcatttacacatgtgctacacattcctaaagggacacatgagcttggcaatgataataatttagaaaatgttaagtgaatgtggcagtactttcagttcaaagcttgtcgtttaatactctaaggaaaccatatctaatttgaaaagtgatcattttacttgtttgggggtttttgaagatagtttctcttgtaacagtcctggctgtctcagaactctctttgtaaaccaggctggcttcagagtcacagagatggtcctgctgctgtctcccaagcactggattgaaggcatgtacactcctggtgaaaactgttctatatatggtattgtcaagctaggaatatagctcagagagagagagagagctagctagcgtagtgcgcatggagtcctgtgtcattttccaacactaaaaataaagatactgttattagggacacgatgtaatatggaaatgtgttatttaattcctatttttcttgggataagaattttgaagtttggtcatcattgcttcctgtgtgtacttaccagatatctaaatttgggcctgtatctatggttcatcagtaattgctgggcatgatggctcatacctgcaagcccagtgttattgagagagactggaggattaccatgagtgcacggtcaggtgttagatttatgtaaggcatggaaaagagtcttctcttatgtatattatattgccttgctctgtgttaccctctcttctgggctatattaaaagattttgccacatttttgtttgttttgtggggtttttgttttgagatggggtttctttctgtagttttgcccgttttggaccatgctggccttaaactcaatatctgcctgcctttgcctccaaattgcttgattaaaggcataaaccaccactgtcaggcatttgttttgttttgttttgttttgttttgttttgtttgagacagggtctcaaccctggttggttgacttggaacccagtccggccttaaattcacagacatcatcctcattggattaatgacttgcaccactagaccttgtcgattctgtaggaggtcgatcacactcatgacatttggattcttaaaaaagtttaggtgatgttaggttctagaatacctttttttttttttttttctttttttctttttttcgtagctggggactgaacccagggccttgtgcttgctaggcaagtgctctaccactgagctaaatccccaacccctagaataccttttttactatcacatattggtgtggatatattcatctatatgaccttttcttcctttaggtagatgagcaggatgacagttaagagtctgggggcttggggctggggatttagctcagtggtagagcgcttacctaggaagcgcaaggccctgggttcggtccccagctccgaaaaaaaagaacaaaaaaaaaaaaaaaagagtctgggggctggagagatggctcagcggttaagagcacccgactgctcttccagaggtcatgagttcaattcccagcaaccacatggtggctcacaaccatctgtaaagagatctgatgccctcttctggtgtatctgaagacagctacagtgtacttatatataataaataaataaatctttaaaaaaaaaaaaaagagtctggacttggggggctggggatttagctcagtggtagagcgcttacctaggaagcgcaaggccctgggttcggtccccagctccgaaaaaaagaaccaaaaaaaaaaaaaaagaaaaaaaaaaaaagagtctggacttggtgcatacaactctgatctcagaatgatggtcattctaggctttaagaggagtcccagagcatgtctttttttttttttggagctgaggcctgaacccagggccttgtgtttgctaggcaagcactctaccactgagctaaatccccaacacccccagagcatgtcttaagaaagctaaaatattctgggctggtggggtggtccactggctaaaggacttgctgccaagagtggtggcccgaatttgatatctagaactcacattgtaggatgcctggacattctactctcacctccacgtgtccttacacttttgtctcatgcatacaaataagtaagtgttaggaaattctccccttacagaagaaaactgttcttaggagtcaaggtcatccctgactggctagaatccttgtctcaaaagaaaagaaagaatctatagtctaattgtagtttaattttattactaaggtaacactctgcttacttgaaacattggtttggttgatgtttttacttaattcattttgtgatttgatacaggagaagagggtcgtaatgagttctggaggacatcagcatttggtcagctgtttggagacattacagaaggctctcaaaggtttgtgtacacctttgaaatgtgttcatcttaaggctcatgttaaggatttgggagaaggccaccttccaaattaaattcaaatataaattaaggtcgataactttctacgctagacattgcttttattttcatttatgaagttgaactcaatttgttcctgaattcacaaatttttttttttaaagatttattcatttattatatataagtacactgttgctgttttcagatacaccagaagagggcatcagatctctttacagatggttatgagccaccatgtggttgctgggaattgaactcaggacctctggaagagtagttgggtgctcttaacggctgagccatctctccagcccctgaattcacaaattttttattgacttgtttactttatgatttgagtgtgtgtgcgtgtgcgtgtgtgagcgggagcggaggttagaaatcattaatgagtcggttctttctactgtgtgttttgtgaacttaactcagtctgtcaggcctacaaggcacgtgctttttccaattcaaaaactatctcattttgaagcatttattatgaattcatttaattttgagaccgggtttcaccatgtagctttggttggcctggaactctactatgtagaccttaaactcacagagagctgcttgcctctgcctctgcctcccaagccatgggaacatgggattaaagtatgcaccaccaagcttggcttaaaaccttgggcttttgagatagggtctcactattgcgagtcaatgtccttggctatcctttgatccgaagatcctcctacctcatcctcctgagtgctgggatttagatgcgtgctgtaacgcagggctgtacctttgttgttaaacattaataatgcttggttggtgtgtcagggcttaatggccctgagtattactctcggaggagggggagaaggaataatactatatactaccttcttttattttttaatgtttcgattggtttattgtatgtgtgtgtgaatgtttcacctgcatatatgtgtatgtaccgtttgcatacagtaacagtggaggtcagaagagagcgtcagatcccctgaaactggtattacagatggttgggaaccatcgtgtgggtaatgagaacttaacttgggtcatttgcaagagcaacaaatgctcttaattgctgagtcatctctccggccactccccacctgattttgagactaggtggcatataatccagacaggccacaaccaccttatgaggccaaagatgacttgaacttctgatcacctttgcttccaagggctggcactgtatgggcagtgtcatcatggtgacctccattccgttccaccctctgtttattcagccatctgttcatagacacttgggttgcttctatattttgtttggtgacaaaagtcaaacccaggacctcacatgtgctaggcatgtactctgactgggtctcagcttctatgtcgcctccatcttcatgtctttgttcgttttttgtttagttttcagagatggggtttctgtgtagccttggctatcctggaactcactgtgtagaccaggctggcctcaaactcactgagatctgcctgcctcagcttcccaagtgctgtgatcaaaggcataagccaccagtgcccagcctctacctttgatttttatgattactgtgagaattatttttgcaaggagctaccagttgagctgaggggaattcatatcatgtaaagtacatgtgcttggaattgaatccaaggcaccaagtatgctgtgtgttccaccattaagatacacctttgagggactggaggggtggctgtgtagttaagaactctagacttgggttggagagatggctcaggcggttaagagcactgactgctcttccagaggtcctgagttcaattcccagcaaccacatggtggctcacaaccatctgtaatggagatctgatgccctcttctggtgtgtctgaagacagctacggtatactgacacatgaaataaataaataaataaatccttaaaaaaaaaaaaaaaaaaaaaaaactctagactttccttaacaggacttgacttcatttcccagcacccacatggcagttcacaactgtctgtaactccagatccaggggatttagcatcttcacacagacatccgaacaagcagaacaccaatgcacataaaaagtaaatacagcctgggctccctttctgttctcatccctctccttactctagcattaacacacagtctgggagtgagatcaccagtccgcctgcccggctttgtattagtttcctatgctttctcttagctacagataccgtgacccacataagtagcaataaaaaaggagaaaaaacataggttaatagtgtttttgttttgtttgaggcagagtctcacagactagtctgactgggaattattatgtaatgcagtccagggctggcctaacaggtgtgcattgttatgcctagtgctgatattttttgtgtctctgtctctcttgtgtttaaggcagggtttcactatgtggctaaggctggccttgaactgctgatccttccgcctctgtcccccagatgtcggctgtcgtcataggtgtgtgctagcacacctgacttgatcctataatttttgtctgtttttttctttagccatccatccatttatttatttatttattgtgacagagtttctctgtgtagccctggctgtcctggaacgcactctgtagaccaggctgacctcagactcatggtttagactcaggcctgcctctgcctccagagtgctgaggtgaaaagcatgcgtcaccagtgcaagctccataattttcaaatacagctttatctcttacttttcctatttctgtgacataatacttaataaatgcaaattaaggatgaaggtttgattttttgccttagaattttcaggtgtgtagtctctcatgtggggaaggtatggcagtcaggatgtcaggtcacagtgtactgaagtcagaggcagtgatgaatgctggcactggctcacttgctccttggtcctaaccacccacattcagagtgggtcatctcagttagacctctttagaaacaccctcggagatacagactagctgtacatctccttagtactctgaatccagtccaactgacaatgaggcttaagtgtcacagtcttactgtactcttagcacctatttacggtgactgtatcaccttgtcctttacctgactactaggtcacagctaagcctcaataaatttgtgtagattataggcatttgaactattgactatgttcatggctttggaaaggtggatatactcgtttatttggaatattctgtatgatttccttttctccccctacatcttttcatagtaacatctttgccagcaatgactgatcgtttggaatccatagccagacagaatgggtatgtaatcgtatggtgggcagaaatgtacaacacagtgctaatttggggagcgttcttatgtgtcttctattaatttttgttttgatttgttcctgctagactgggctctcatctcagtgccagtggcactgaatgttacatcacgtcagatatgttctatgtggaagtgcagttagaccctgcaggacagctttgtgatgtaaaagtggctcaccatggggagaatcctgtggtatgtgttgatatttcactggaatctatggggtttccttaggaacatatttaaaaatgaattgttggggtcggtatagcttggcttttaggattttttttcatgagccactgtagagatgatgtgatgggtcgcactggtagtttcagaataaaatttagaggaacaggtctttctgacatcatccaagggcactgctgagcagacgcaccaaccacgcagcccttctcacttcatacgaacaaacagagcttaggtcgaagaagcgatgctcggaatacagaagcaatctttcaattcccatcctagtgactatcatcatgacagacaatatgagaaaccctgtggtagaaatggatgtaaaacgtgcataactaagcagttctgtatagatttcagggatgatgttgaagagagatcctaatgttttaaacacactactaaagacgcctttataaatgatttcatttgttttgattttaaaaattcccaccccaaggtcatggttcacaagtagaaaaaggctttttgcggggctggcaaaatgactctgggtaaagcatgaggacctgagttcagatccttagcaccatgtaaaagggcgcgttcataacccagtgcttgaggctggagggactgagacaggcaggccctggatgcttgcttgccagctaccttgagggaaacatcaagtctcagggtgaccttcagattcagggagaccttgtctcaggacacatgaaggacactgatacaagaagagctatggtctccatgcacacacatgctcacacacacatgctcacacacacagctttcgtcttgaattagggcttcctgtggttttaatggttttgttttgaagcatgtgctattaaaattttttgatatttttaattttgttaattagtttaatgctttaacctaattttttttttatttcagagctgtccagagcttgtgcagcagttaaggtaagcaggtaatattggtctctttcttgacactgacagataatcctgttctctggagggaagtggttggtgtggggcttgtgtggagggtgttgccctggcgtccagtctggccaggcactctacattacataatcatgcctcagctttctgagtagcttagctcaaaggtgaaaatgtttgctgatctttgtaacttggacttgcaattgatttattaattcattaatttatatatatatatatatatatatatatatatatatatatatatatttgttgttgttgttttgttttgttttgttttagagacagggtttctttgtataaccttggctatcctggaactcactctctacagagagtggcctcagactcagatccacctgtctctgcctcctgagtgctgtgatttgactagactttctgtctgttcctgtttatgtttagaattgagctaacatgactttttgtttgttgtttgagacatggtttcatgtaacctagactggcttcagtcaagtatgtttttcaactcccaatcctgtttttacctcttaaatgttgggattagagacatgaagctaacttgagactggtcttaaatttactatataaaccttgaacacttagtattcttttaaccttatttttaaaaatttttttttattaatttttatttatatgagtacactgtagctgtcttcagacatgcgagaaaagggcacgaggtctcattacagatggttgtgagccaccatgtggttgctgggaattgaactcaggacctctagaagaacagtcagtgctcttaactgctgagccatctctccagccctcttttattcttattgtttgtttgggtttttgaaacagggtctctttacatagttttgagtgtcctggaccagactcaaactcacagagatctgcctgcctatgcctcccaagtgctgggattaaaggcatgcacaccactatgcctggcttttattttacttgcttttgtgtgcttggtattgaatccagggtcttgttcatgttagtcactttacattgactcactctctcaccttaggctttgaactcctaatcctcctgaactctcctgtctccatttctaaatgctgacattataagcatcctccatcacacccagtcttgagtgtgacagtttttacccctatattcagtttatcacttcagtattatataggtaatattttatgttttttcatttctttttgaggcaggataccactggctgacctggactctttgtagaccaggttttcctccaactcacacagaaatccacctgcctctgcctctggaatgctttgattaaagatgtgtattagtagccctggctgtgtatgtgtcttatctagtacactctgacctcctgcttactatgtgtctaggacagtcttgaactcttggatctcatgccttttttctctgagtactgaggtcacaggtatacaccacttcccagctttattgaaattcctttgccaaagtgaatttactcaatatatcttaggacatttagtagcatccctggcttctttttttggacttgccaaaaatatccactcaattgtgataatcaaaattatctggataagagctggagagatggctcagtggttaagagcactgacttcttcagagatcctgagttcaagactcagccacatggctcacaaccatctgtagtgggatttgattctctcttctggtgtgcatgaagatagagcattcatagatataaaacaaaatgctttttaaaaagctgtggttcaatttaaaaaaaagtttgagctggatatttaacttagtagtggagcatctgcctagtgtgtagtcttgaaggttcaatttcttccagcaccacaatagatgcataatttttttatattatgtgcatatgtatatttacgtgtatgtacttgtgtacacacacacaccgtttcggatgtcagcagggcaaaatcacaactgggtaagaagtaatgatagaatcattggaaattttttgtagatcaaatgggactagaatgatagcacatgactttatctgaagacaacctgatctatagagtgaggagttggagggcagccagtgctatgcagggaaaccctttctctgctaccctaatgctggctttagagtgttcacctccctgcttttaaagttttttttttcttttcttttcagtttttttttctttttttaattattcagtctggaaccttagctcctgggacagatattaccatatcttagactaggtcatgtcacttttgttgatctaatcttcctaattaatcccttacagatatgcccagagacttggttccatggtgatcctaaatcccatcagagtaacaattaagattaatctcatcacagagcactaccattgaatgggattgtatgagagcattgactccataccattaagacaacatttctatttcaactgagaaaaaactgtgtccgtgtattataatctgtcacaatgaaagtagtaggcttggcaacagtctttggtttgttggttgcttttcttgctatcttgattttttttttcctttgaactgagtggggttgccatatttaaatttaaacccagacttaagacttcctggtaatttgaggaagtttttgtttcgactattgaacataaggatgtcttagaaagatttttcactttgaggaagtaggttttatattcagacgtttttattagcagtttattgtatttatatataatacaatgtataccaaatttcaacctttaaaatgtttgttttttaggcttatttattttatatatctgagtactttgcctgcatgtatgagtgttcaccacacaggtgtctgtagacatttgtgtgggtatggagaactgaacacgttctttatgagaatagcagtgttctgaactacagacccaggttcataaaactgtaatacagccaggcagtgctcacctttcacctcaccactcaccactcaggaggcaaggccggtgcatctctgcctttgaggccagcctggtctacagatgaagttctagggtagccagggctacagagaaaccctgtcttaaaaaaccaaaccaaactaccgaagaaaacccatgtaatatggtcaaatatattggtctgtatacctctatgatcgcttccagtatccagaggccagtagaggggaattgttgcaagtttgagctttgggctacataatatcaggctagcctgagctaccctatctaagcaaacaatggggctggagaggtggctcagtggttaagagcactggcttctctttcagatgatccaggttcagttcccacaactgcatgttactccaattccaggacacctttacaaatatatacatatataaatgcatatatgcatgcatacatacaagcaaaaacatcagtgcacataaaagagactcaaacttttcctacatcttcctcctaaatgctgggattaaaggtgtgtgctaccatgtctggcttgctcttatgatttttatgttcatttcattaaaagaaaatgaagggactggagagatggctcagtggttaagagcactgactgctcttcaagaggccctgagttcaagtcccagcaaccacatagtggctcagaaccatctgtaatggaatctgatgcccttttctggtgtatttgaagacaactacaatgtacttatatataataaacaaatctttgaaaaaataaagtaaaaatgagtgagtgaatgaatgaataaataaattaataatacataagtggtgataagttaaccgtgtaactagtgcgttgaaactcactaaaatgtataaacaaaatactctagaatgagtgaatacttctggctgtcacttagagtagaagattgtactaacttaggaatttgtgagactctaaaatttgcaaacctttttgaagggggtgatttataatggaactttatctcttttttaaaaaaattatttattttatttatatgagtacattgtagctgtcttcagatacatcagaagaggcattagatcccattacagatggttgtgagccaccatgtggttgctgggacttgaactcaggaactttggaagagcagtcagtgctcctaaccgctgagccatctctccggcctgatggaacttatcttcacctcatattttggtcactgtgcatggtgatagtgtgttagaaaatagatcttactgctgttcctattttttaatgccacggtggtggtgtgtttaaatgcttacatcatggagaataaactgtttagcattgtatttaatttgttttagacccattttctttaagattaaaaacaaaaggttggggatgtagctcagtggtagagcgcttgcacgcaaggctctgggttcagtccctagctccgaaaaaaagaaaaaaaaagaagatgaaaaacaacagaggtcatgggagggggggagcaagcaagtgcgtgtccatatgtgtgtcacatgcctttaattcaatcatttgggaagcagaggcaggtggatctttgagtgtgaggcagctttgtctacagagtgatttctagaatggacagagttataaagagaaaccctgtttcaagaaacaaagcaaacaaaaacagagttaaaagcagagttgttggaatgtgataacatctttttttccccttctatttctttttttttttttttttggttctttttttcggagctggggaccaaacccagggccttgcgcttcctaggtaagcgctctaccactgagctacatccccagccccttccccttctatttcttaccatgtgttgaattcttcttttttttttttttttttttttttttggttctttttttcggagctggggtccgaacccagggccttgcgcttcccaggcaagcgccctgccactgagctaaatccccaacccccatgtgttgaattcttagttctaatccacaaaagcacctttgaatcaaattttaagactgaatattgggataaaaaacccagccatcacactagtatattttttattctgtgttgtagtcaaacacaggagtgttttctagtgtgtgattagcttctgagatgacccctgtctgtcttctctcgacttccaggttgcatgtgactggagactgtcttcccagctcatgtactttgattatctcattttcaatcaaacatgcatgtggtatcaacccagtcttagtcacacattaaaaagagggaaggtgtaaagagcaaaagagctaaatgtgtatgagttaagtatcaattatcgggtcctttgactttgtatgtgtattctcggagttgaaccccgggctcaggtcaccatggaactatagactcccctagactttctttccttacggtactggagatggcgccaccattagtcctgttcagctatacctctagacctatgccttgtttttctttgttgttttccctcaaattcccatttctttgtttttggaatcaagtcttgctctgcagctcaggttagtcataaactcactcttctccaaaatcttcctgcctcaaagtctgcagtgttaagaatataccaagtctcactgccttttgaccttttaggtgttttgttttgttatgttgtgttgtgttgtgtttctctgtgtatccctggcggtcctggaattcagtctgtagaccaggctggccttaaactcagagtagtcacctgagggaaaaattcatttatatattttatatgtctgagtgctctgcctgcatatatgcttacatgacaaaagagggcatcagctcccatacagatggttgtgagtcaccttgtggttgttgggaattgaactcaggacctctggaagagcagtcagtgctctaaaccactgagccacttctccagcccttttaaagtttatgtgtatgaatgtcatctctgcaccatatgtatgccatgtctataccctgtaagccaagataggttatcagatgccttgttagtggagttgtagggtgctgtgctaagaactgaaactaggctctctggagcattggccagcactcataaccgcagccacctgcagcccagctctttttttctttctagattgactataaaacttatgtggataatgatgtgagcggattattgaagtgaatttgtatagccatgttttctgtagaataaagtactaatttcttgttgtattttctctttctccaccttcctgaattccctttagggaaaagaattttgatgagttttctaagcatcttaagggtcttgttaatctgtataaccttccaggagacaagtaagtaatttcatttattcctttctgttttccattctgtaaagatgagtatgagtctgtgagccagtttggcttacacattttcatacctttctgctgtatgtttgttcctagtttctattcatactataatctatagttcaccttacgactttttaagtatttttattttaatttaaaaatttttattttacatatatggtgtttttattgttttcgggattttgttagtcttagttttttgttgttggtttattgtttttagggggtagtagtggtttgttttaactacatgtgtgtctgtatatcagatctgtacctgtggaggtcagagtaggccagatctcttagaactggagctactgtgtaggtgctgggaattgaacctgagttgtcttggagagcagtcagtacttttaaaccactaagtcgtctctctagtccctaaagtactttatttttaacttttctatctcctaaggtatttatttgaaaaacatatctgcttttaatgacttaaaatttgagaagatagaatacagttgttgaaatatcttcagtgttgatttcagcgtatggacctagctgagattctgttaaactgcttgacccttttgaagcaaaataaacataagctctggtagtcttttgttttttgaaaaaaatgtatagtagcccaggcttgatctcaacatgcagttgaggatggccctggccttgaattccttagtttcttctttatcccacttgataagattaccccctgccatgatgtccagctttcatagtttgtattatttatttcacctttataatgagatctggctgtgtaattgtagctgtcctggagcgctacacacagtagcccagctccgactcatggtgttctgtctgcttcctcctgagtactaggattacagttgttagacttgtgggtttttttactttttttttttttaagagttaaaacagtttagttgtggctggagagatggctcagtggttgggagaatcaactgctctaccagaggtcctgagttcaattcccagcaaccacatggtggctcacaaccatctgtaatggggtccgatgctctcttctgctgtgtctgaagacagagactgtgtacttaaataataaataaatcttttaaaaaaaacaaaaccgtttagttggttctaacctttgagtcagtgtttttggttttcttgttattatggttttgagacagggtctcacagagtaaccttgactggactagacatgctcagtagagtaggctagcctgacctcagagagatccccttgcctctgcttcacacgcactgggattaaacgtgtgtgcatgcctggcctgggactgtgctggtgtgtgcttacgtgtccgctgtttaactgttctcctctcatccactctctagcaaactgaagactaagatgtatctggctctccagtccttagaacaggacctttctaaaatggcaattatgtactggtaagactgactgatgggaccatcctatgactctctgagtttttcctctgggtggtgtgtaatgtcttaatttttacacttatatgtgtacgacagtatatgtgattacatatctttgcatataactatgtagtacatatctgcattaagcctgttttatacacactcactatttgctattttttcaaaatgattattacattctattgtctaagtataaaaactcagaaactcactgattattgagatagctcagttattgatgagttgttggttgttattctagactatatctgaaatattctcagctgaattgattatctgacagttatccagttctcatttgacattgagagtctctaggacaaccagttgggctgacatgtggcctgcagcaatgtcacctgcagttacagaattatgggagtgtacatacctgggttagttggattttttactacattatatagtcatggttcctggaaggtgaagagcacatcttatatgtacaactacaagttagagtaattttgatagtattataagactttgatgagcttcactcagtatcagacggttgagtgaaactgtcagttgctaaactcaatcacacatagatcatttgtcttgtaggaaggcaactaatgctactcccttggataagattcttcacggaagtgttggctatctcactccacggagcgggggtacgttatcctctcttgagtcctatcttgttttttgttttttgttttttagaaaatggatcgatttagtttaagggacagtattttattttaatatggatgcaagcgtggtgtgtatgtgtgtgcggaggccagagtaggacaggcagcctactctaccgttctgccgtaggaccttgaggcagggctccttggggatcctggatcaggaatgagaaagcagcatttagttatcttcctgtccctgcccaaggcggttctggagtgtggttggcttcttagctgcttgtgcttgcacagccgcacgcttacccacagggccatctgtccagcacccacatttcctttttgttcctttgcagtgctgggaatcaaccagagttctgtgcatgctaggccaggtgttcaccactgggctacctgcccagccctgaggatttagcactcccccaaccccctttctggttgtgagtacactggctgtcttcagtcagacacaccagaagagggcaccgaatgctcttaacctctgagctgtctctcagccttttttatttttatttttattttttttttggtaagattgatgagtgctttatctgcaggtacagctgcagaccagaagagggcatcagatcccattacagatggttgtgagccaccatgcggttgctggggactagactcaggacctctggaaggcttaatcacttagctatccctacagccctgggtatatcactttcaattttgccttgagcttgtgaagacataagctcaataagaaagttaccagtagttttttgtttttttgtttttttgtttttttttttctttttctttttttccggagctggggaccgaacccagggctttgcgcttagctaggcaagcgctctaccactgagctaaatccccaaccccgttaccagtagtttttaatgacttctaagatattaatactttcccttttttatttaggtgaaatatattgttgttcccagaatcggtgatcttttgtcatatttcataagcttttttaggacaggactttgcacatttgcacaactctttgtttttatattttgatactttttttttttttttggttctttttttcagagctggggaccgaacccagggccttgcgcttcctaggcaagcgctctaccactgagctaaatccccaaccccatattttgttacttttaccttctttctgaatgtgtgttcttttaagtatgtggaagtcagagtcagttctgtctagcataaagtccttgggaactcaagttgtcagacttggtggcaagtgttcttatctgccttataagctatttcattggcccaatagaacgtacgtgtgtgtgtgtgtgtgtgtgtgtatgtgtgtgtgtgtgtgtgtgtgtgtataagcttatagaaacttaattttttttttcatttttgtttttttcttgatacttctgtttgtgctggaacttactttgtaggctaggctggccttgaactcataaagatctgcttgcctctgcttcctgagtggtgggattaaaggtgtgtgctaccatgtggggttttttgtcattgttgttgttttgccctcttggttttaacattttattttatgtgcatgggtagtttgtctatacagatatgcctatatatgctggcccgtagaggtcagaggagggcattggattccctggaattcaaagtacagattgttgtgagccaccatatgggtgctaggagttgaacctgtgtcctctgagagaatggccagtgctgtaaaattgttgtgccttctctcaagccccagattatgggttttatgcttttatgcagtgctggagctcaaacccagggcctcaggtatgcgaggcatatactctttttttttttttttttttttttggttctttttttcggagctggggaccgaacccagggccttgcgcttcctaggtaagcgctctaccactgagctaaatcctcagcccctcgaggcatatactcttatcatctgaattgcatttctacccagtctgtgtgtgtgtgtgtgtgtgtgtgtgtgtgtctgtctgtctgtctgtcttctgtgtgtctgtcggtgtctctgtgtgtctgtcttctgtctgtctgtcggtgtctctgtgtgtgtgtgtgtctgtctgtccctctccttttaggtggaatcagggtctcgctgtctttaagtggggcttgaactcattgtatcacacagcctggcatcttcttgtcatcccagctattgtgagccacaacacctagcacttgtatgagtgtaggtgtaggagtgtatgtgtgtgtaggtgtagggtgtgtatgtgtgtgtaggtgtaggagtgtatgtgtgtgtaggtgtaggagtgtatgtgtgtgtaggtgtaggagtgtgtgtgtgtaggtgtaggagtgtatgtgtgtgtaggtgtaggagtgtatgtgtgtgtaggtgtaggagtgtatgtgtgtgtaggtgtaggagtgtatgtgtgtgtaggtgtaggagtgtatgtgtgtgtaggtgtaggagtgtatgtgtgtgtaggtgtaggagtgtgtatgtagttgtaggagtgtatgtgtgtgtagttgtaggagtgtgtgtaggtgtaggagtgtgtgtgtgtaggtgtaggagtgtatgtgtgtgtaggtgtaggagtgtatgtgtgtgtagctgtaggagtgtatgtgtgtgtaggtgtaggagtgtatgtgtgtgtagctgtaggagtgtatgtgtgtgtaggtgtaggaatgtatgtgtgtgtaggtgtaggagtgtgtatgtaggtgtaggagtgtatgtgtgtgtagtgtaggagtgtgtatgtaggtgtaggagtgtatgtgtgtgtgtgtaggtgtaagagtgaatgtgtgtaggtgtaggagtgtgtgtatgtaggtgtaagagtgcgtgtgtgtaggtgtaggagtgtatgtatgtgtaggtgtaggactgtgtgtgtatgtaggtgtaggagtgtgtgtgtgtatgtaggtgtaggagtgtgtgtgtgtaggtgtaggagtgtatgtgtgtgtagtgtaggagtgtgtgtggctgtaggagtgtgtgtgtgtgtgtgtgtgtgtgtgtgtgtgtgtgtgtgtgcactttttgagaagtattatggatttacttgaacctagtgcttttcatatcctaagtaatccctgagctatctatccccagccttttcttgttagtttgagaaaaggtttctttataggagagttccaccacaggtaccatgaattctttttaatagctttcatttatgacaggtcatttaatgaacatgaaatactatgcctctccgtctgacctgctgcatgatacaactgcctctcctatcactttgcatgaaaagaatggtaagtttgttgcttcatgtacttggaggcagacctctttttgtaactaggctgccctggaactcactatgtaacgcacagtggctgtcagacgtagagtgtggtgatcatacatttcactttgccttccgagaactgagactataggtatgaactagcattcctagctggagatggtcttttgagacaggatgacctccacctcctaggtgctggagttacagcatataccactatactctcctttcgcccatctgttaaaagcattggaaaaattcaaatgcccagcctccccctctaatcttcatataatccgggtttttttaagatttatttattttatgtgagcacaccgtagctgtcttcagatgcaccagaggagggcatcagatcccattacagatggttgtgagccaccttgtggttgctgggaattgagtcaggacctctggaagagcagtctgtgctcttacccgctgagccgtctctccagccctggcttgtaacatttgtgaattttgtggaattagagtgtctggttcatagtgactgatactgcaaggatttcttctgcatgttagttgtgctgctgctttctcctcaggccagcctcagacgtactctgtagccgccgcttacatgatgcctggcttttgttttttcctgtgctttgttctgtttttgagactgagtctaaacttgtagctgaggtgggcctctaactcaaatccatttttctttctcattctgcagaatgctgggtggacacacaggaccagcattcctctctttttagtgctgagatctttttcctacttatgaggtagaaaatctttttttctttttctattcccagttcctcggtctttgggaatgaatgcctcagtgacaattgaaggaacctctgctatgtacaaactcccaattgccccattaattatggggtcacacccagctgacaacaaatggtaagatacagttttaaagtagcgaagtctgtttttcagcttcaagcgcagtgtgagccatgttttatttgtcttgtcttcctggaatgtttagatgttgccctttgcgtccgtgcacggactttactcctgttctttactggagtgtgtctacttgacacacacacttgtacacatttgtttttaaatcgtttaatttttttattctgtgtgtgtgtgtgtgtgtgtgtgtgtgtgtgtgtccgcgcgcgtgttgcctgtatattgttctttgcaccatctttgtacctggtgccatcagaggctggaagaggccattagatcctctggggctaatgatggtatgagctgcctcgtgggtgctggggattgaatacaggtcttttagaataccagatagcaccattaaacaccaagctatgccagtatcccctgtagaccatagtctttgctctgaataaatgagttggagttttgtgctggtttttgaacccaggactacaaatacctgcacacagagctggaccgtgagccccactgtacatacttaattaagtacttcacaattaacaaggtaatatattttgaaattgcatcgaggatagtagaaaagtaagcttttgatagaccttgtgggtttgtgtaatatatacatgtctgaataaatgtgttcatagttttcaaaatagaaaattttcccctcttctttctttgaaggaccccttctttctctgcagtcactagtgccaacagtgttgatcttcctgcgtgtttcttcttgaaatttccccagccaatcccagtatctaaagcatttgttcagaaactgcaaaattgcacgggtaagctctgttttttaaaatgtttgccagcctgtaataaaggaaggtttacctgttaagataaaacttgttaaagtgagagtggaaaacattagactatcttaaacagcttacagtcctcaggcctcaaggacgtgctactgagtacaggtgttaggacattactagtaggtagtactagtgctctctgagaacttttggatgtgggtgaaggcatggaaagtgcaagagagaacagtggagctgtctggagagatggctcagcggctaagagcactgacttctcttccagaggtcctgggttcaattcccagcaaccacgtggtggctcccaaccatctgtaatgagatccagatccaatgtccccttctgatgtgactgaagacagcaacagtgtactcgtatacatgaaataaataaatcttttttaaaaaataatgtgaccattataaatagtccttatattttcaggaatcccgttgtttgagactccgcctacttacctgcccctctatgaactcatcactcagtttgagctgtcaaaggatcctgaccctttacctttgaatcacaacatgcgattttacgctgtaagtaggccctgtgggtttgcaacaatgttctttacagcattagtcaggttgatggctttcttttagatggcttaatttttagttgggcaaaaaaaagtcatcttaaacatactaaagcaaaagagaatgagctttgagttcagaaacaaccacctacatttctgtctatatcaatttatgtgcatcagtgttttgcttatatttgattaagtatatgtataacctgcatgcctggtgtcaaagaagtaagaagatacctaagttagcattacggacgtctgtgagtggccatgtggatgctgggaactgaacctaggtcctttggaagagcagcaagtggctgttaaccaaggagcattctttcttaccctctttgttctagacaggttctcatgtaacccaggctggcattgaacctagcagagggtgatcttaaacgtcctctaggttgctgtgactataggcatgatgagaagtgtttacagaggaagccaggactggtggaacatagtatatggggagtggaggcttaaggattcctcgacttaggggtagcaaaaccttttctcaaaaaagcaatagaaaaaatgttgtatcagaattaaaaatcttttaatgctgtcttgaacttttagaaggttgaaagatattaagattttttatttttgggggctggagagatggctcagtggttaagagcactgactcctcttccagaggtcctgagttcaattcccagcaaccacatggtggctcacaaccatctgtaatgggatctgatgtccttttctggtgtgaactaagacagctacagtgtacttgtatataataaataaatcttaaaaaaaaaaaaaagatttttctttttattcttttgagggcatggtgccacacctttatccctgcacttatgaggcagaggcaggtggatatctgtgagttcaaggccagccagggctatagagaaaagctcttagttaggattttattgctgtgaagacaccatgaccaaggcgactcttataaaggacatttaattggggctggattacaggttcagaggtgtggtccattatcatcaaggtgggaaccacggcagcatctagacctgagagttctacatcttcctccaaagaactagaagcaggctgtttcctggaagctaggaggagggtctcaaagcccaccctcacagtgacactcttccaacaaggccacacctcctgattgtgctactccctgaggcatgcacatttaaaccacctcagaaagccttctcagagtgggaggaagaattgtttcttaggccaagtgtgaacagtgaggaaccccccaccccttttttaaagatttatttattttatgtatatgagtacactgtccctgtcttcagacacactagtagagggcatcaaatcagatcagagatggttattagttactatgtggttgctgggaattgaactcagtccctctggaagaacagtcagtgttcttaaccactgagccatctctccagccccaagatcctgtcttaaaagggaaaaatggttccttttaatttactatctttatgtatatgagtgttttccttgcatttgtgcccacatgaaagccagaagaggttgtcagattctcctgaaattggaattacagactgaactgtcctgtggatggatgggtgctgggagccaaatctaagttgtctgaaagagcagcatgggcccttaactgctgagccatctcttcatccctagcccattgagtgctacagcaagaacccttaactacagggggaggacaaatgctatgtatataaattatgaaaggccccgacttcctatggacttgaatttgatatgaatgcttagcttatacagcattgaagctctctagttctagctatagtatcattatacagaatgttttaagatacagctttgtaattctttagaaactgctagtataaatttctaaggtggtttttattttagctaaattaggaatccacctgaatagtacatttatatacagaaatcttttagctaaataaataactagttggcattcataacgtaagttgcaagaggtcttgtggatatgtgaagtttactacatcccatactttggtattccttctgcctactccaggatagttttgacttggtacacttctaagtaaataccattcatttccattgctgtctttgcctaggctcttccaggtcagcagcactgctattttctcaataaagatgctcctcttcctgatggccaaagcctgcagggaacactggtcagcaaaatcaccttccagcaccctggccgagttcctcttatcttgaatatgatcagacaccaagtggcctataacaccctaattggaagctgtgttaaaagaactattttaaaagaaggtactctctttccttttgataaacttactggaagattgatcctgacttcttcaatggctcttaaatttggtagttcatagaaatacccatatagctttaaagacttcaggtgtttggttcaaaactcagattaaaagaattataatgggggttggggatttagctcagtggtagagcgcttgcctagcaaacgcaaggccctgggttcggtccccagctccgaaggaaaaaaaaaaaaagaaaaagaaaaaaaaattataaaaaaaaaattataatgtcactgtaaactaaacaatcacaattgggaatttagattagtcaccacaagttactttgatggaactaatttgttacaattggtatttagagtaaaagcggttgtgtgtatgtgtgtaaagcagttctctggatttacattgtttcttcttgcccgaaacttctgataaatacctgtctgtgagatttaatagttcatactgatttgtttttattctttagatgagctcattttctaggccaggctagccttgaattcagtgtttcatagactagtcttgaaactgaggtgacccttctgcttccgcctctcatatgttagcattatggtctacactcccattcctgttcacttcttctgaatagaaccataactgggca

SEQ ID NO: 1057 - DNA, 32306 bp, Homo sapiens
  source 1..32306: mol_type = genomic DNA
ctctctctggtcggaggcggcggtaatggcggatggtgggttgtggcgccggcggcggctgctgtgagggacgatgagtgcctccttcgtgccgaacggggccagcctggaagattgtcactgtaacctcttctgcctggtgagtgccggggccggcgggcgccgagggaggggggccgcgaggtgcgcccttgggccgtgggggagggggccgggtctggtccagatgcccgagttcccgggcgaggcccagccggagccggcgccctgcgaagctccgcggccagccccgggaggcggcgttcgctctcctacggtcccgggctctgtttaggggagtgttggcattttttctcgtcttgtttcggactctccttctcaccgtagtctcgtcctcaacttgagctccttatctggcaggacagtaacctttccctcttgtcttgcttaactgttgcttttctccttattggccctgtatccctgcttcacactttacattattgcccctgctccccaccgcctttatgtcttacccttttaatttggtttccccatgtaaacaggaccccagaacttaagccctagaaacctgtcttggttttacattttttttgtatgagtcaaactaacgccaggttagtttctttcttgggtgacttaagatctctctgtaaaagccagtaggtgccatttcatatgttttctttttaaactttgaaaacagtttgccatttttgacaatttctagccatcttgcttttattagaacatgatgtttttgtgagagtgaagggggctagtggacgaggtgctgtggttttgcactgtttctatatttattgtgttttggttgctttttcagaatgttttgagcaggctgctcccttgtttgattgaaatggaaagtcgagagaagcgggatgtagggatgatcattgtgtaggttagcccaggtctggtaacatccaacagttaaggctttcagaagtaccaactgttgcaaataacttgtcctgtatgggacagtagctgagcttcatcaatgactttaagtttgggtgactttactttttcattttctcctttgtgctatgagaaatattaagagtatatgataggtaagtgagttaagtgggaggagcacaactagttggcaagtgtaaactgccagtcatgtatcagcagtttcatttttggcaccttatgctttgctcctttaagttagattaaattactgaattcctcttgtcgaatttcttaacgcccatgctaaattgagatctttaatactctatcctcgtctacagtatgtttttcttttcaatgtccattaatcagcatctcttcacatgtaataagacatacaccaggttttatatttctatcttatccaactcagtctatttttggtacttttaggatcagttctttgaagatagactagcacaaatctgacagttctttgtgagtagctatttgacttttccgacaggggtgtgtgtgaagaattaacatagattttttcagaacttgttcagatgtcttttcattagagacgttacttctgtaaatgtggaataaaaacccatgatagggtctttaataattgattttcagttaaaagtttgacaccagtgaacaaatgtgaccagttaggacagagaaaaatgtactctgtttgcatattgaagtgtgtgtctatatttaacatcattcagtttcttctgtttctacttggagtacatatttgcttgctattcagtgacatggtggtggtaatttttaactgtattcttctccctaaaattcttggttgttgaattataaagtctttttttgttctaatttgcagtcaatatctcaagcatacattgaaaaattgtaatgtcttaatgaaataagagacatcatattgagtacttttgactttgagtgaatatgcagtaataaaacttaatgctttctttccttcaggctgacttgacaggaattaagtggaaaaaatatgtatggcaaggcccaacttctgcccctattctgtttcctgtgacagaagaagaccccattttgagcagttttagtcgctgccttaaggcagatgtacttggtgtttggcggcgagatcaaagacctggaagaagagaattgtggatattttggtggggtgaagaccccagttttgctgaccttattcaccatgacttatcaggtgaaagaaactttccatttctaactaatgatatagcaacattgtatacttctcccagaatgtcatatgtattacaaattaagtttgtttttgtgggagacttaggaggccagataaaaattcagcttcattgttttatttcaccatgattattttattttacttaaattatccatgttgttatagctgggtttttaaggcgtgaatgactttctccttccaccacctctcttcttaatttctcacaggtagttagggcccgaagaaggcatgttacattaatctaaaaaaatggaatcaggaaacagagttcctaacaaagtcgtgtaatagtttagaagccagatgtaacttttgagtcacttcagccactgctgaagttgagtcttttgcattgaataggcagatgattctaaaagtactggaaatgtaactatccgtgtgtgtgtgtgtgtgtgtgtgtgtggtgtgtgtgtgtgtgtgtgtgttttaaggcatgtattttgttattgtcatttgtgctatttgattaacttatgaaggcatatgttaatttagttatttttggaaagtgactcatatactgttctgtcaaacataataagagaaaagtgccaacttgtttagcttttatgggacatgggatcataatctaaaaggttacacaaacaattttattgtgagcaaatcaatgtgattacttccttattttcttgacttttaggaccaaatgctactttagaaagagaaactatagcttttcatataattactgaagctttaaattgtgaaagtcagtattaactgaatcttagataataggaatataaatgattggttgtatgctataaggttccaaagacttcagtaagatagtttgataatgatttttgacagataaacttaggatttctagataattttttttaagttcttatttgaaattgagtactctgaagtttttgttattgtatctctgacctataggatctattttatttttggatagaatgtattctaggtgtctgtatcttgaactggtacttagtaagaccaacatttatgtaggaatgtacgtgttacatttgtatgttttgataattgcttttcacattctaatgaacatactctccagtgttaattgttatttttgagagtgactgcaattcttcaagaaagctttccagcttttgtagtttttctaataagatgcctgctgcagagtccagtccttagttgtgtgtatttaatgtagttctaaatgtgtaaagtgatgtgtatatgtatatacatatatgtacatatacatgatgtatgtatatatggtagttttagcgagacaatactttctaattatgccaaaagctaagtccgccagcctcctttttctttcattgttttggatatagtatttgagttattttaatcgttaagtggtcataaaaatcaccttactagaatgtttggagactgtataacattgttgaaaaactataaactattgataaaatatatttgttgataaaacataattattgataaaactataatggtgacttaggggctttggtcttcttaataaagttggcagagcatctaaacagactaaacagatctttttttaagattccatgaaatacactttgtagaatcaaagataattttaagagatacataatgtttaattttttttttctttttttctttttaagtagagatggggtcttgctgtgttgaccaggctggtcttgaactcctgaactctagtgatccttccatcttaacctcccaaagtgctgggattacaagtgtgagcccctgcacctggcctagttttaccgtaatagaaaaaatattgtgaaagttaaaagactattaaagttagatgtgagctgctttgatggatattgttaaaagtcagttttgtcttctaggtttcatgttaccagtcagatatgttttctccactgaaactaggttacagtcttaaacatttttctctagctttgatttttagcgtaattttcaaaaatggtagttacttgtacctttaaaatagtgatcagctgggtgccatggctcactcacgcctgtaatcccagcacttttgggaggctgaggcaggcagatcgcagggtcaggagatagagaccatcctggccaacatggtgaaaccccatctctactgaagacacaaaaattagctgggcatggtggcacgcacctgtagttccagctactcagtaggctgaggcaggagaattgcttgatcccaggaggcggaggttgcagtgagccgagatcttgccactgcactccagcctgggcgacagagtgagactctgtctcaaaaaaaaaaatagatagtgatcttgaacgtgaatgaaaataattttgggaggttggttttttttttttttttgagacggagtctcattctgtcccgcgggctggagtgcagtggcgtgatctcgctctctgagtgcagtggagcttgcttgctgcaagctctgcctcctgggttcatgccatactcctactacctcagcctcctgagtacctgggactacaggcgcccaccaccacgcccggctaattttttgtatttttaatagagacggggtttcactgttagacaggatggtctcgatctcctgagcttgtgatccgccagccttggcctcccaaactgctgggattacaggcaggaggtagggttttaactgctgtcagactttactgaatgctaatgaatggtaaatagctttttttttgagatggagtcttgctttgtcgcccaggctggagtgcagtggcgcaatctcagctcactgcaacctccacctcctgggttcaagcgattctcctgtctcagcctcccgagtagctgggattacaggcacatgctgccacactcggctaattttttgtatttttagtagagatggggtttcaccgtgttcgccaggctggtctcgaactcctgagcgcagacagtccacccgcctcggcctcccaaagtgctaggattacaggcgtgagtcactgcacctggccgtaaataacttaaaaatttatcaaagtgaagtgattgaaataataaactgaaatacaattaggagtggtatatgatcatatttattgttccaaagcttgtcctgtactgttttagtttgcatagtcagtgttatttatataatattttagcttttcttaaaaataaaacctgttatttacttaagaatgttgttacttaaatcagacgtatcttaaagcataataaggttttttcagatggaatatatttgtcttgcccttttctttgctctagggacagcgtctacctccctcttggggtaattagtctgcctctgtctctctagctaacccctttttcatttcttccatctgtggcactctatttccttcttctaagctcccctgagaagagagcagctggacagtacagggtagcatcagctgctggaggcagtcctgagttccaagtggaggtgtagcactgaggaatggggtaccggaaggacccaggtggtaactaaaaagctggttaatttagcttgagcctgctcttcacaggcagtgtccttctgtttggttcagcacacaccacatcttgttactgaagtgttttttattatggtgataatattgcccttgtttttcttggtagtgagggaagagggaaagcatttcttttttcaaagattagaattctcagtttttcttaactggaatattcagtaacagaaatacagaattgcctttgtttaacccccttagctcctttgtgtcatgcagtgtatttttaaaaattaactaatgaaccaatattgatactttattattaactaaagtatatatttggatttcctttatttttttgcctaatatgtttttcttttctaggatctcatttaagatacccctattacatttaattgtcatgtctccttaggctttgttagactgtgacagtttctcagactttctttggttttgatgatttcgacagttctgaagaatctgttcagattccatagtgcattttaaatttcattttctcttatgtcacttagcatttgtttgggttaccttcctttcaagtttagctgatgtgtagaaatagaatgtaaacttattttattgctaactggcaaagatcagttacagcaaatcacgtctgatttaatacatactttaaaccctcagttactcattttgtagcagtaagtcaataccgttgagcaaagtaatttgcaaaggctggatgatttttggatcaggatttgtgctaactagtattagccaaactataacattccagaaggttatttgttcaaaaaatctcttgaattccaaagccaaacatagatgattttcttactttttgctttatcctctataggataatgattagttgaatcggggtcgatatgttttgatacaaaaaggattagggaataaaactcctttggggttacagcttttttctttctttctttcttttttttttttttttttttttgagatgaagtctcgctctgtctcccaggctggagtgtagtggggcgatcttggctcactgcgacctccgcctcccaggttcaagcgatccttctgcctcagcctcccgagtagttgggactacaggcatgtgtcatcacgcctggctaatttttgtatttttggtagagattttaataggagtttcgccatgttggccaggctggtctggaactcctggcctcaggtgatctgcccgcctcagcctccccaagtgctgggattacaggcatgagccaccatgcctggccccttttttttaaaaattgtattttgtagctttgtttagtggttgtgtgatagtgggtgaaagaggtataaaatgggtgatgggaaaatcttagctcagtccctctggtcaagaatctctgtggtgggtaggactggtacttttaagtgtactgttaatttgcttcagagcaagattgtatcattttcattaatgtggtcttgaaggagagttttctgtgtatttttattctgtgttctaacatttttggaattcaattgctgtcatcattggcttttattctttccctttaaataaaaataaaagcaaacactgcgtcctctcccatttgtcatcttaaaaaaatcatagcaagttagactgtgatgagactctttgagaaaactgataccttgtgaactaaaaaaactcagggctaaaaatatttgttctttttcctggctcctgaggtctgtaaagtagattttagtaacatgttcagatagttttattataccagaattttatcataatgaatagtgctcaaactaagtggactattgttctgaatttaattttggatgttttaattgaaggatattaactgtagtggactttaaccttaaatgacagctgttaataggattgacagatagataaacagccaggcataggaatctagtcccagccaaactaaaacattgttgtgtgccccacatagtctaaagagagtaatttatttctactattgtaaaatttacttgtgatgtggcccgactctttaaattggctagtctcctaggtgacaacttcatttgctgtatttcttctgcatactgtttttttgatcaagtgtatcttctaagttttcaagccaaacataacatactaggctgtttttaaatcagttttcaagttttgccatagataatgatgcggccaacttaaggctctcggtatatttgttgaatgtataggttattaatgattattcaggagaaacactgatctagcatttaaacatttctctttatttcaggaaatacatggtattttctaccatgttaatttttgagccattattcattagcatatgttacattttaatagttttgcaaaattgtattggagaagattcattttttaccaccgtggagatatttaaagatgccatttttttgagaaaaatgttgagtgcagggtgtgtctgcttttttggttgtgattttttttccccattgatagagaattattttgatgacttatcacatactttggcactactgtaatctgcatcttcaggaaaaaaatatggtaatcaaatttagcatttgtgttttcttccaataaatagtccataaaaatttcaagaaacactgatgattaagaactgtaatgctaatagtaacagaaaagtactaagaatgcagagttgaactttattttctctggacatagagctacaagagaaggaatttttttttcttttttttgtagggatggaggtcacactttgtctcactcagcctgcagtgcttaatcatagctcactgcagcctccgactcctggactcaagcaatcctcccacctcagcttccccagcagctgggcctacaggcattgccactatgccctactaactaaaaaaagttttttggagtcagggtcttcctgtattgccaggctagtcttgaactcctagcttcaagtgatccttctgtcttagcttcccaagtagctgggattacaggcatgagtcattgcacctggctagaggaggaaaatagttatatagattaagcagactttttctattaggctctggttaagttcaaaagagataggtaaagatttgccatatgttcccttctccttcccctccctattataatgctggtgttgagattcaagaacttgtttcaattagtgtaaatagtgcatatcactatgccttgagtgggttggttgtaccatttcacttttcgtatctgaatacaacgtgtagaaagtacttttattacagttattagattgtcaggatattagaaacttggctcagtaggcttcttgtttctaagtgattcccaacaaaaccaaaaaccttcagactttattgagcgttattaggacttactctcgtttttctcagcaacaaaatatgaaattatattactttagtgtaatggttgcttagttgcttgccatatagatgaggacatacttcagagatacgttggatttagaaaacctcaacaggtggtctctacttgtttgttttatgcatagctcctatttagtgttaatgagaattgtgggcactggggacataagatgcccaccccctctgaaagcattagaataatgagggagaaatgcttcaagattaatactgattacttttctaaaccacattcaatattctttttttttttgagatggagtcttgctctgtcaccaggctggagtgcagtggcgtgatctcggtttactgcagcctctgccacccagttcaagtgattctcctgcctcagcctcccggatagctgggactacaggtgcatgccatctcgcccagctaagttttgtatttttagtagagatggggtttcactatgttggccaggctggtcttgaactcctgacctcagatgatccacctgcctcgacctcccaaagtgctgggattataggcatgagccaccgcacatggcctcacattaaatattcttaaatcatttgactgcaagtttaactaaaatagattttacaaaataaaaccataaaattttcagaatttcatgtgaaaatttataaattgtgctttagcttttactattgcaaaggtttttttttttgtttttttgagtcagagtctcgctatgtcgcccacagtggagtgcagtggtgtgatctcagctcactgcaactcccatctcttgggctcaggtgattctcatgcctcagcctcctgagtagctgggactacagccgtgccatgcatggctaatttttatatttttagtagaaatggggttttgccatgttggccaggctggtctcgaactcctggcctcaagtggtccacttgccttggcctcctgaagtgctgggattacaggcatgagccaccacacctggcctcagcctcccggatagcaggcgtgagccaccacacctggcttcagcctcccagaaagcagatttttttatttactatttttgcgaaggagacaaagtcattttctagttttaaatgactaatttatttgaagtttataacaactgtacaaccttgatacttacaaatggtaactgtgtcttgggtctttgatgctttaaaacttaggagaaatatgttggtagtggtttcttatgtagaacaagtgttacaaccatcagaaggtagggatttttgaaataaaaggtaataaaaataaaagatactaaattgattgtaaagaggtgaagaattggaagatattcctaacataattctgttggaattaagaacatgtatattctagtagtcataagtctcataatttgaggtaaaagtcttaatgtagctatttaattttgaaatggtaggacctcattaaattgaaagcagatcaattgagattcttttctctttttttgtcatcaactcacaaatatgcttgtgatctagacctttaattaattaaagtgaagtcactttgtgctgcttctctattctcctagcctaatactttctttaatgaagtgaaacccataaacgttttggttttaaatggaagtagataacggtgtctttgatataatagaatgtgaatttttcctatttaatatttatgattaatattagacttaaaaaattattctataccaattctgaaatattgtcattttctcaagcttattctacttttttttccctaagcttacctttttttttgtttgtttgtttttttggagactgaatctcactctgtcccaggctggagtgcagtggcacgatcttggctcactgtaatctctccctcttgggtgattctcccacctcagcctcccgagtagctgggattacagggctgcactatgacgcctggctaatttttgtatttttagtagagatgggctttcatcatgttggcgaggctggtcttgaactcctgacctcaggtgatccgcccacctcagcctcccaaagtgctaggattacaggcgtgagtaactgcgcccagcctaaagcttatttaaaataaaatttaaaaaaaaattagttgctttgaaagacttgactatcatttaggagaaaatataaaaccaacattaatctttgtagtggcacagaatttctagtgcagttaaagtccactatcatactttttagttaatgtttattctacccatttgttgtataaattgtgcatataaaccatgtgtaactcttaatacatgtctttgcttttattcagaagctcatattgtgtctgtttttctgtgggtatagtgtatgcatttttggtgttgaattgagaaacgtttgtcttttatttttacttaaacattgaacacagatgacccatatttacaaaatgtttataaaggtatataggctatagaaggagagttaattatatttagactaagcaatttaaaatcttgtaatgaaagttagagtgctgaagtggtatcattatttgtagcacgatttgttggatgctttgtgacagatatgaaatggatagagtacacaaaaaaatttttctgacctacatccagacttatctcaaaatgactgtgttaatgtttttttggtaaattaacttggagtgattaatagatttgttggcaaaattgaagctatatagttagtgaagatagctataattttatttgacagaagtgccatttacaatttaagtctttaaatttttaaatttctcccccaagtaaagggtcctgtactgaataataatcatgggaataatttgtttgaaatgagacctaaggtggctgatagtgcaccgcttgttaggctctgtgccaacagcttcctttttattcatcacttagtgttgtagtggagtcgtggattagaatgctgatggacatgaaatgttttgactttaattattaactggctagtttttttggcaggttgaatgactaggggaattaggacaaagtaacaagtgagccagcttagaaattggcatcataggtgtagagtgtgtttaatattttccaggttatacaaacaagtgtccttttcattaatacaggaaccaattcagtatgttcatgatgtcattgaattttataaggtggaaaaatacttttcaggtaatttaatagaatatgtggcacttagaccttttattccttgtggagtaactttgaaacctgataatgtctagagatacattgaagtgattgtagcttaatattctggggtaagctagtgttgatgaatatagagtttaaactgtaaccttttttacttggctctgaatagattatagtgtcactattttattatttccttcatttctcttttagaagaagaagatggagtgtgggagaatggactttcctatgaatgccgtactctgcttttcaaagcagttcacaatctattggaacggtgtttaatgaacaggaattttgtacgtattggcaagtggtttgtaaagccttatgaaaaagatgaaaaacctataaataaaaggtaagctatcttaaattctgacgtgatatttctttagatttgttcctttttgtgtcttaacagagaatgtgggataaaacaagctaatatacagacatattccagaggttgtcagtgacagagtactagatacagtcaggttttttttttttttaaaccactttacaaacttccctttatacactttaagcattttcttactgtaggaataggctgtattttaatacagtggcctaaattttgatttgtgatgatagacttaatgtgggatgaaagcagagacttaggcttggaagtatcttttttttagtatttgtggaaatatatgcacagcactctgatattaaaattaagtaacaacacctgttaaggatagtgatctgtgagtatgttttggatcaagttaacccttcttattcccaatctctcaattccctttaattaaagtaatttaaatttgtgttttctatataagaccatttactctttgagagcttataattttcttgagcaatgaattaagcaaatttatgacactacttattagactagttgcagatagaggcacagaagacttatgatagatacctccttctcctatgcaattaaaaccttcaggttactcgcttctccgtgatttagataatataaggcatagtctctcaaaagatttaagttcccagcagtcattgagttagtgagacttcaagagagatgaaccagtggcaagtaagttgggatgtggggaagagaaaactaaagggaacttactaatttttcctgaaagatgtgagaggatgtgaagtgaacatttggttgagattgtaatcattttgaggtctttgatgtcatatatgcacatcttttttcatgtgcacctggagtttttgtttgtttgttttttcaaactttttagttttagtaagactggatgagtagataagcctggataaataaaggtgctttcattttttttcctctttgaaaattaacgtaaacctttattgttaacaaaatacttgtgtaagttcagaatgcattcagctggaaatgacagaacaacattaactacttggcttatgtagggattgatttttctcagtagcaagcagtatggaggtcgatagtttagtactggtatagctgttcaataatgtcatcaaggattcaaagttccccagagttttctctgtgccatttttacatcttcatggtcctcccgtgtgttgcacctccagacctcacagtggattccaggcaggaagagaaaggaagggaggaagtaaggaaggtgtggcacctgagtcagaaagtaaattattttctggaaactttagttgacatatctttggccatactaagagaaacaaatatcttttatttggaaacagctgctctgaacaaatgaagtttttgttagtaagaagaaagggctgatagatattagatagataccaaagatcaaagaagtggaaatggatattgggtaggcagttaacaatatctgccatatacatttatttatttattttgagacaaagtctcactctgttgcccaggctggagtgcagtggtgcaatctcagctcactgcaacctctgcttcccaggttcaagtgattctcctgcctcagtctcccaagtagctgggattataggcgtgtgccaccacacctggctaattttgtgtatttttagtagaaacggggttttgccatgttgcccaggcttgtcttgaactcctgagctcaggcaatccacccgcctcggcctcctaaagtgctgggattacaggcgtgagccactgctcccagccaggcatatagatttatgtagttttaagaagtcaaacagattaccaagatttaaaatgaaaggctgcaatcctgagccccaatgaatagatttgctcctcagaagcagccctttttaattcttctgtttcttttaagttacctgtttaaaaattttgaaagacataacatgcttattcttgagttatcatttaggattaatctagtggactttttttttttttggtcacaacagcctaccattgaaattctattgactttctattgagaggttagctatcttacttcccccgactcaacacttggatattggcacttttgcacacacttcttttccctctccttttccttttttttttttttctgatacggagtttcactcttgttgcccaggctggagcgcaatggtatgatctcggctcactgcaacctctgcctcccaggttcaagtgattctcctgcctcagcctcctgagtagctgggattacaggcgtctgccatcatacccagctaatttttgtgtttttagtagagacaggtttcgccatgttggctaggctggtcttgaactcttgacctcaagtgatccactcaccttgacctcccaaagtgctgggattacaggcatgagccgctgcacctggcttcctctccctttccttatcttgccaatatagttataagttttggtaaaaacaatatttgtttatactcttataattttataaatattatttgtaactgagccatagtatattgaaacacatttcatttcattctttttttttttttggagacagagcctcactctgtcacccaggctggagtgcagtggcgcgatctcagctcactgcaagctctgcctccctggttcacgccattctcctgcctcagcctcccgagtagctgggactacaggtgcccgccaccacgcccagctaattttttgtatttttagtagagatggggtttcaccatgtagccaggatggtctcgatctcctgaccttgtgatccgcccacctcggcctccccaagtgctgggattacaggcgtgagccacggcgcccagccttcacatttcatttcttgtacatcgttttgttttcccaggtgttaatgattatccctttttttcacttaattattaatgttatgagttagtaaacacctgcctgtactctgccactttttttgtaaataaagttttgttgtaacacagccatgctcattcattgatagattgttttatgcctgctttcacactagagcagagttaaatagttatgatagagacagatggcttgcaaagctgaaaatacttagcctgaaatattttctagctgactttttgtagtttgctgactcctgatctgtgtacctgttggtagttcatcagtagactatctattagaagtataaatcacttctccctaccttcaaggactttgtataatcttatgagtttccctttttttctcctcttgttaattaatatccctgttgttacccttcattcttcttttccgatttggattagtagttctgtagtcctgtttcacagtagtcatcttggggattctctttgcttttcccttcttgttggatccctcatttctcatttctcctttttttttttttttttgtcttatttactgttatggtggtgcccaacctgagagtagtttcctgagagtgcaaggatggtgatacttttgagatcctctgtgttggaattctgagtcaaaccgcagaattgcaggctcttaagtttctttcttttctatccttataattgatagttttgactgggtatagaatctttgattagcaaccctcttagacttctgggtactaaaatgctaactggaggttctgtgtatgtgagtagcttatgacattgcaggctttactagagtgaatgatctggggacttgactctttttattgggtgcctgtcacccacctgccagtatttgtacgctctgtcacctgcttaagtagttttcccagaggagactttcagtactctgactagagggtataagctgggctgccagtgtttagtgaacctattggggaaaggaggtttggaggtggggctcacttacatagtggttaaattttcacttaatcttttaaatacatcatctcagctgtatctgaatatctctaattctgagtccctctgtttcaaccatttcaaagagtggacctcttaagtttttcactgatctggaagaaagtggagaggctctaatatctttgaactttcattccttctgctttctttttctttccttttttttttttttttttttttttgaaacagtctcactctgtcaggctggagtacagtggtgcaatcttggctcacttcaacctccacctcccaggttcaagcggttctcatgcctcagcctcccaagtagctgggaccacagacactagccaccacgactggctaatttttgtatttttaaggagacggggtttcgccatgttggctaggctggtcttgatctcctggcctcaagtgttctgcccacctcagcctcccaaagtgctgggattacaggtgtgagccactgtgtccagccccttctcttttcagttacacctatatatccaccttcagggatatatatatacatatatacatatatatatatatatatatgtatatgtatatgtatatgtatatatgtatatataccagtaccttcaacttctgagcctttctgggattctgtggtttgactcagtttataactttgtaagtttaaccactgcacccggctttctttatgaaaaactcttaaaaggctattgataattgaaaatataggctcacacctgtaatccaccactaaggggccgaggtgggaggatggcttgagaccaggagtttgagagcagcctgggaaacatagctagacccccgtctctctctctctctctcttttttaatgatcttattttatttatttatttgtttgtttatttttactttaagttctgcaatacatgtgcagaacgtgcaggtttgttaatagatacataagtgccgtggtggtttgctgcacctatcagcccgtcatctgggttttaagccccatatgcattaggtatttgtccttatgctctccctctccatgctccctatcccctaacaggccccagtctgtgatgttcccctccctgtgtccatgtgttctcactgttcaactcccacttttgagtgagaacatacagtgtttggttttctgttcttgtgttagtttgctgaggatgatggtttccagcttcatccatgtccctgcaaaggacataaactcattctttttgtttttgagatgaagtcttgctctatcgcccagggtggagtacagtggcatgatttcagctcactgcaacctccacctcctggattcaagcaattctcctgccttagcctcccgagtagctgggattataggcacccaccagcacgcccggctaatttttgtatttttagtagagacggggtttcaccatgttagccagactggtctcgaactcctgacctcaggtaatccgcccatgtcggcctcccaaaggcctgggattacaggcgtgagccaccatgcccagccgaactcattctttttttatggctgcagacccccgtctctttaaaaaaaaaaaaaagctgggcacagtggcacacactctgaagtgggacttcagagtcccagctactctgaagactgaggtgggaggatcacttgagctcagaagattgaggctgcattgagttaggattgtgctgttgtactccagcctgggcaacagagcaagaccctgtcttaaaaaaaaaaaattgaaattataactttttttttttgagataaggtctcttattttgtcacccaggctggagtgcagtggcacaatcatggctcattgcagcccaaactgccaggctcaagtagtcctcacacctcagcctcccatgtagctgggaccacaggtgcacgctaccaaggctggttaatttttgtagattttgtagagacaagatatcaccatgttgcctaggctggtcttgaactgagctcaagctacccaccatctttggcctcgcaaagtgctaggattacaggcatgagccagtgtacctggccaaaaatacaacttttaattggatattttcatgaatccaacagatgctgcttgttatttaaccatgtaattgagcactagtgtttttccatgggctgacccatttaggaggggaactaaattaagattgtattttattagtgaagtgttaccagaaatagtatatgctctttcgagttactcttgaaccatagttgtggtataataactgactttattctggaaagataaatgctgctcctcaaatctcttttttacaggaactttcttaccctttttccttctttggaaaagcaagtaggacaaaaatcaagcagctaagtctatctttaagttattacttcggacttcttttctgttgaattcagtggaatgatatagggaaggtagataaagattgattataaattaatgcatttctagaccattctgaaacataagtattatatagactgtttttgttgactaatcaattcacttttggtataagtattctgaaaaaagaacaagagttgtaaagaaagaaaatttatgatgtgaaactactttgacctgaacaaaggagaaaataatattgcttacctttttatcttctttttcctttctttaaaatttttaaagaaaaaaatctcattttctgataatctggacctacatgtagttgtgtgtttaacagtctttagggactgaaagagaggaaatagaatcaaattctagggatacagctaggttacctgtaaagaatcccgcaagtgtaagagtaaccacaggaacaaaccagtcttcagataattggtttaaagaatgatgaccagtgttttcttgaatagtttaggtgttttcctacattgctggggactggatcacatgacaggcattgagttttctagtgagcccacaagcaaatgggttgtagtaagtaccactgacttaatgtaggttttagtctcttctataaaagatattctgaacttgccatgtttgagagtgcatttgaaaaagattatcttgaataagaactttttttttttttaaatagagacagggtcttgctctgtgcccaagatggatggcagtagcgcaatcataactcattgcagccacaaacttctgggcctaattggttctcccacctcagcctccagagtagctgggactacaggcacacaccaaccacgcctggccaagaactttcttaagattgtgtttggttaagctttttgtcatgttgaatctgttgtagccatttagctgagtgtgcggtaaagtttgtgtatttagcaaaagttttaaatgcttctaggagggtatacagaatagaaacatactagtaaagaattctttttttagacagctagttcagtatcttacgtatatagtgacataggaggttttgttaagtggcagatgagattgtgtataggagggaaatagttaatagggaacatgtttgattttaatacatactttaatcttaccccattccctcaactatatataattgatttctatggaaaaaatatgttgttaaatcttttttgatatatttactgtatgtaaaatagttatctttaattccaattttaaaaggcaatataggccagatgtggtggctcatgcctgtaatcccagcactttgggaggccaaggcaggcagatcacttgaggtcaggagttcgagactagcctggccaacatggtgaaaccctgtctctactaaaagtacaaaaatgagccaggtatggtggcatgtgcctgtaattccagctacttgggaggctgaggcaggagaatcacttaacccgggaggtggaggttgcagtgagcagagatcgtgccactgcactccagcctgggtgacaagagtgaaactccatctcaaaaaaggcaatatagagtattacatgttatatatgtgtgtttgtatgtctatattacattatgtgtatacatatagacatgtacatataggatataataaatccttgctggatataacataaagaaaataggattaaatatttggttcaatatgttctaagcctttgtattagaataattagagccctggaattagtagtaaaaaacttagtccatagagagtgataaatttttgattttgtgggataaagcagtaaaagttcacaggaaggaaaggatggctgttgttaatggccattgtattgggcagtgtagatgtagaacattttcatcattgcagaaagttatttttttgggtggtattgcttacacaagaacctttatatttataattaaaacagtacttttggtgcttcaataaagaaattcatcgattttttttttttaaggaagtaaatgaaagaatatgctttaaatttcacccataaagctgtgtttattttctgccatatgtatggcttttacattatctcgtgctctccaaaactgattaaaaataggcaccatgagatgtaagtctcccctgaaaatgtattattaaccattagtagcgttaggatgtcctttggttaggtttctcactgtctccgaaaaggcaaatttctagagaagctaggagctattgctgttaggttttttatggactcatttcctctcttcctgtcatctaatgtactgtccagtagaagtataatgtgagccacataggtaatttaaaattttctactaggcacatttaaaaagctaaaaaaaaactaaatgtataggcaaaattaattgtaatatattttttaattcagtaagtccaaaataatatcatgtcagcatataattaactatgcagaaggttttaatgaaatagtttactttttgtactgcttttgaaattaggtgtgtgtgctgtgcttagagtatatctcagtttggattggccacattttaagtcaccaatagttatatgtgtgtattggctattgtatttacaacacagttctaggggtttaagcccagttgaacttggtagtgtttattagtgaaaggtaccttctctggtggtcagtgaacccttctggaattgtatgctaaattgtgagtatgctttagaatctcaaaggcaagaagaatcccgtaccttgtatcagtcagggtatgaactctctgctaaattaggtgtagttacttcagcagactggatgtgcctttttattgttttccctgtagcctgtctataatgttttgtccttaatgtctgtcatcaagattattatgtatcatttctgaaatcttaaatgatgatgtcactagaatttgcatggtcaattttctacattttcatgctttctagaacgtttatgagaaaaatgctaagacttctcctatttttcctccttgttgaggttttcttacaataatttttctttctttctttctttcttttttttttttttttttttttttttttggagacagggtcttgctttgtctcctaggccagagtacagtggtgtaatcttgactcactccaacctctgcctcctgggcgcaaacaattctcctgcctcagcctcccaaatactcaggacttaggagtacaccaccacacctgactaagttttgtaatttaggtagagatggggtttctctgctggccatgttgaccaggctggtctctaactcctagcctcaagtgatcctccagcctcagcctctcaaagtactgggattacaggtgtgagccaccatgcccagcctttcttaccgtaatttctttctataattcttactgtagactcttacaaatctgtccaagctcatacagctatcaagtgttggagctgcattttaggcatgaaaaatatgaggtagattatggacccctatagaccgatatgtctcctacacatgtattttttttaagttacaggaaatagtaaaaaccataatacttaaaaacaacaataaaaagcagcattttgcagaacacttgaagtggtaaaccagaataatgttgttgctaagttttgtggggtttttttggttttttttttttttttttttgagatgaaaccttgctctgtcaccaggctggagtgcagtggcgcaatctcggctcattgcaactgccacctcccaggttcaagcgattctcctgcctcagcctcccgagtagctgggactacaggcgtgtgccaccatgcccagctaatttttatgtttttagtagagtcggggtttcaccgtgttagccaggatggtcttgatttcttgacctcatgatccacccgccttggcctcccaaagtgttgggattacaggcatcagcccccgtgcctggccactttctaagtattatttactgtataatgtaagtaatatgttcactgagtgagcagaaatatgtacaggattcacaggtaagatgttaacttctggattttagtatagatcttttgttcatggagctatgttaataatacctgatactggtattatacctgtaaatttaaaaatttaaaagttactctgaaggctgtagaaatacagattaatgattcccaaacttgtctggatgtgggaatcacctggagagcttacaaaaaattattgatgcctgtgtcttaacctgggactgtaatctgggctttggaaattttagaagatcctaatgtaagacaagtttggaaacttttgaattcacggaataaaaataatctcagaattaagatggctaggggaggctgggcacagtggctcatgcttgtaatccctgcactttgggaggccaagacaggaggattgcttaagctcaggagttcaagaccagcctggacaacatagtgagacctcatctctacaaaaaataaattctaaaaattatctggacatagtggctcacacctgtagtcccacctaacttcgttggctgaggcaggaaaatcgcttgagctcaggaggtggaagctgcagtgaattctgatcatgccactgcactccagcctgagtgacagagcaaggccctgtctcaaaggaaaaaaaaaaagatgactacagtttctttttattgtggtaaaatgtacgtaacaaaacttaataatttttcagtgtacagttcagtggcattaagtacattcacattgttaaccatcaccactatctatctgcagaactttttcatcatcccaaactgaatgtgtactcataaaattttatgagtggcagctcttcaatttttcttttcttttcttctgcttcagataaccaccattctactttgtctgtctagaaacttgactattgcaggtacctcatatgagtggaatcatgtagtatttgtccttttttgtctgggttatttcagtaagcataaaatcttcaagattcatttatgaagcatgtgatagaattccccttatttttaaggctgaatagtattccgttgtatgtatatactacattttgtttatgtattaatctgtaaatggtatttgggttgttttcaccttttggctattgtgaataatgctgctatgaacattggtctgcatatctctcatcaagtccctgctttaagttcctttgggtgtctacccagaagtggaattgctggatcatatggtaatttgaagtacaatttttggaggaatttccatactgctttccatggtggctgcactattttacattcccaaaggcaatgcagaggagtgccattttctccacatcctcatcaacacttgttatttcctgttttttttaaagctatttttatgggtgtgaggtggtatcttactgtgtttttggtttgcatttccctaatgattagtgatgtgttgagcatgttatgtgtttatcggccatttttatatcatttttggagaaacgacttttgaagtcttttgcccatttttttaattggttgatagggtgtttagagtttgaagtcagcattctctttactagtattatgattttaacacaagccatttaacctctttgtgcctcggattctctactggcaaatgggatatcatttttctgtagctgcttaatacaaatgctagaaataggtttgatgtggcactgcctaatctagcatacatatggaattgttgctgttagagcagccagctttaatctataagcacgtcttcattttctgttttagaaataatcttttgattaatttcagtacttaatttgaggaacttttttttccacgatggaagattgttcaagtttcatttataaaattctgcctcattcataactttttgttttagatattgtagtgtgagctcatggagagcaacagtattctctgcaatcctttatagtaactaataatacttcgaattgttattgtggtgacatgtttttgttttaactcacttttctgagtgttaaataccaaaaatgtttgatgggatgatacaaataacatttctccttggaaaaaaagcaagtctgaatttactatgttagtattttctaattgttttataatattctctgactagaatattgcctttaatataaggatttcggagatttgggtgtggtggtgcacacctgtagttcaagctacttaagaggctgcggcaggaggatcacttgaggttgggagtttgaggctgtagtgctccgcgactgtgcctgtgaatagccactgcactccatcctgggtaacatagggagactgccatctcttaaaaaaaatttcaggccggcacagtggctcacgcctgtaattccagcactttgggatgccaaggtgggcggatcacctgaggttaggtgttcaagaccagtctggccaatacatggcaaaaccccgtctctactaaaagaatacaaaaaaaactagccggacgcagtggcaggcgcctgtcatcccagctacttgggaggctgaggcaagagaattgcttgaacccgggaggcggagtttgcagtgagccaagatcacgccattgcactccaaccttggtgacaagagtgaaactgtctcaaaaaaaaaaaaaaaaaaaaaaatcttggctgggtgcggtggttcatgcctgtaatttatagcactttgggaggccgaggtaggcagatcacttgaggtcaggagtttgagaccagcctggccaacatggtaaaaccctgtctctactaaaaatacaaaaattagctgggcatggtcatgggtgcctgtaatcccagctactcaggaggcagaggaagaagaatcgctttaacctgggaagtggaggctgcagtgagccaaggtcgcaccactgcactccatcttgggcaacagagcaagaaacttgtatcacatatttagaatattgtttccctccagtatcacatacaaacttggtttattttaaaccactgaatgttacaataagatcagactattgtatattgggattacatgctagcagtataggaggtagtgattctttgatcatagactgctgggattgagtgttgttagtaaatagggtagtggcagataaacagtgggagctgagaccattggttacatgttttgtactttggaatactggattgctacaaagactccttggagaccaatttatccctttatatcaagaagccaaattttattttcttatttaacagataaaatggggccagatgaggttagcttatgcttgtaatctcagcactttgggaggccaaggtggagggattgcttgaggccaagagtttgaggccagcctgggcaacatagtgagcccccccgcccctgccatccctagggggaaaaaaaaaattagctgggtgtggtagcgcacacctgtagtcccagctactcaagagggtgagatgggaggatttcttgagtccagtagtttgaggctgcagcaagctacgattgtatcactgcactccagtgagaacctgtctctaaaccataaaattaaaaaatgaagtgggtaagtgctcattggaaagactgttagggaacttgaaagatgacttttatgattttatacatactagagtaaacttattttcctaaataatatttaagataggtcaaattaatgtatatttaaacatttcccatattataatattttcaggaaaatagatttttaaaatgttaaaaatgcttttaaaataatttttaaaatcttttaaaatgtttttaaaataatttttaaaattattttaaaatgctttgtcatgagaaaaatccattttaaatatctttttttgtttggagactggagggcagtggtgtcatcatagctcactgcaccctcaacctctcaggctcagatgttccttctacctcagcctcagcctctcgagtagctgggaccacaggcatgcaccacaccccacctagctaatttttaatttttttgtggagatggggtcttatgctgcctaggctggtcccaaacccctgggctcaagcccaactcctcttgcctcagcctcccaagtgctgagataacaggcatgactggctgtttttaaattctcttatttaatatttcatgtatgaaatgaaacagttgaaaactgtgtttttaagaactatactccactgattaaaggaacagtagataaaaggttataaaattcaggtctcctagccgctgtgtcttttttttttttttttttttttttttttttgagatgaagtctcactctgttgcccaggctgaagtgcagtggcaagatctcaacccactgcaatctctgcctccctgggttcaagtgattctcctgcctcagcctccttagtaactgggattacaggtgtgtgccaccacacccagctaatttttgtatttttagtagaaacagaatttcaccttgttggccaggctggtctcaaattgctgggctcaaacgatccacctgccttgccctcccgaagtgctgggattacaggcctctttgtctttttttttttttttttgagatggagtcttgctctgtcacccaggctggagtgcagtggtgtgatcttggctcactgcaacctgcgtctcctgggttcaagcgattctcatgcctcagcctcctgagtagctgggattacaggcgcataccactgcacctccggctaatttttgtatttttagtagagatggggttttgccaagttggccaggctggtctcaaactcctgacctcaggtgatccacccacctcagcctcccaaagtgctgggattacaggcatgagccaccactcccagccattgtcactgctttcttaacaagaatgataaggtttttgtttgttttttgttttagttatattatttttagtttttctgtcagttacattaatttttattttattttatttttatttacttatatgttttttgagacagtcttactctgtcgcccatgctgtaatgcagtggtgtgatcttggctcactgcagcctccacatcgtggattcaagcgattcgcatgcctcagcctcccaagtagctgggattacaggcacctgccactgcgcctggctaattttttgtatttttagggagatggaggtttcaccatgttggccatgctggtcttgaactcttggccttaagtgatctgcctgccttccaagtgctgggattacagatgtgagccactgtgcctggcctaaaaaaaatttatttcgattaaaagcattttttagactagtcacatatgcagtagtggaaagaggggaaagagtagaacaaggagtttgatctgcaactaactgaacagtcaactgaggtaactcactaccttcagactagcctctgtcagttacatttgtaacttgaataacatgcttaaatttctatttcttgttctatcaagtttagacattttgtattgactccatatgtataagatacagaaattcttagctctgtattgctttttgcctcttttctaccatctattttcccacttctgttaactctagcattacttttactataatttaattttaattcactatgttctgcttatccagaagaaattcaagagggcttatacatatataaaacaggttctgagttgattaatatcatagtttaaaaaacttttaaggatgaattcttaagataaatgtgtggagaaggaataaaaagagtttattttcttagtgtacactcttatcctcctctgcgcaacttgacccttctaaattgtatcttgaagatacctctgatgtccttgggaacttttattttccaacctgtatacccagccatacctgaatttcattaaggtgtactgttttgcatatattcttgattctaggatgccttcaactgtaagacccattattgctttaaaataatgttattggttgggaggggattgcattaaatgattagtccaattaattaataaagtgagaaaacatttatagtttcttatatagaggggaaaataggcaaaaataaaaattaagtcactgttaattctgttgtccgcctttattttctttatccaaataaaactttttttttctttaaaaaaaaaaaaaagagctgggtacagtggcccacatctgtagtcccagctgctttggaggctgaggtcagaggatcccttgagcccaggagttacaagccaccctgggcaacatactgagaccctctctctttctttaaaaaagaaaaagaaaaaaaaaattgaccctactattttggtagcctatccctttccaataaacctactcttctattttaacttatttttgtggctatataataattctatgtgtgaatgtacctaactcgtttaactggttcctgtatttgcagcctttcctactataaacagtgttgtaaagaacatttcttatagctaagtctttgctcatatccatgattttttttcttctgatgaagtagaatttttgggcaaaatagggtatgcatttttgcatacttcctaataaagaaaagcaagttaacatttttggccactagtcatcactaagataaaactttttcttcttttttagtgaacacttgtcctgctccttcacctttttcttgcatggagacagcaatgtttgtaccagtgtggaaattaaccaacatcaacctgtataccttctcagtgaagagcatatcacccttgctcaacagtctaatagcccatttcaaggtagattattttattatattaggtatttgatcttttattgaaagatccttatttgacttcataattttacatttggggattgatggaattccccctgatctttagcctaatgatgattttgatgtcatttactttttccttccccattacagtgttaagtcagtgaaataaatttttaaatacaggtattaccaaaaaattcttgaccgtgaatggtgaagtagtttaaagtgttcttttagatagcataatggatttatatgtgttaatgttttcaaggttatcttgtatgtcaggtcatataagccatattttgtttgtttgtttttgtttttgttttttgagacggagtttcgctctgtcgcccaggctggtgtgcagtggcatgatcttggttcactgcaacctccacctcccggattcaagcaattctcctacctcagcctcctgagtagctggggttacaggcgcgttccaccaagcctggccaatttttgtattttttttagtagaactgggtttcatcttgttggccaggctggtcttgaacacctgacctcaagtggtccacctgcctcggcctcccaaagtgctgggattataggtgtgagtgagccaccatgtccggccagagccatgtgtaacatagctacaaagggacttttgatactatttatactatgaaaaaagttgaattctagaagaaatattttataagattgctgaattgcctctaaggcttggcagtgtgttcttattttaactttaaacctaatatttgctttttaaagtttacatggcagtacattataaatatttagatttatatatctatattgtttttcctcagattgctttttcttagaatgctttttcttagtgggagtcaaagtaaattgaaggatacacaaatattcccagcttctgttaaaaatcttaagagtttgggcagacaattttttttttttttttttttgagatgaagtctccctctgttgcccaggctagagtgcagtggtgccatcttggctcactgcagcctctgcctcccgggttcaagcagttctccagcctcagcctcccgagtagctgggattgcaggcgtgtgcaaccacacccagctaattttttttgtattttattagagacagggtttcaccatgttgaccaggctggtcttgaactcctgacctcaggtgatccacccgcctcagcctcccaaaatgctgggattacaggcgtgaaccactatgcccagcctgggcagacaaatttttaacagtttatataataaactcagtgtcatactttatcttcacagtaacgaagtataataagttgatttttctctggaatggttattactggtttccttttcttttttataattgcacgattatttgccacatttttcactgtgttcttatttggtaaaacagtcttttgttacttatttgatgtctgctttgggtttctagttatcttatgcccatttggactaaatggcactctcacaggacaggcattcaagatgtctgattcagctacaaaaaaattaattggtgaatggaaacagttctatcctatctcatgttgcttgaaggagatgtctgaagaaaaacaggaagatatggattgggaagatgattctttagctgcagtagaagttcttgttggtatggatcctgagtattattcctaaggggaaaatgcatgattgtatgtgttagttatattttgctgaataacaaacaagtctaataactcagtggctttcaacaccaaagatttattccttaatttcctgcccacattacttaagggctgcatcttagctggtttggctccatgtatctgctcattctgtaacctaggttaaatgaatatcccagtagctaggacatgctgttcttatgagaacagaagaataatagggactgaacctaaccatgtaagtgtactcagagcttctgctgggatatggtgtatgttacatctgctcacattgcattagacaaagctagttaaatggccaagccaaagtcattggggcagggaaatatattctgtctagagggaagcatgcttaggatgggacagttaattgtgaatgaattaatatttggaggctgaaaagttgacaacctgtgttgtatgatgttttaacatttggtaaaactaccacttccaataacttaagagacagaaaatgtaactaaagaatttatgactttggcatgctctgcctgccaaaagggtcagatttttttatatttttttattatttatttaatttatttttatttttttgaggtggagtctcgctctgttgcccaggctggagtgcaatggcgcgatcttggctcactgcaacctcctccgcctcccaggttcaagcgcttttcgtgcctcagtcttgagagtagctgggattacaggcgcatgccaccatgcccacctaatttttgtaatgctagtagagatggggtt

SEQ ID NO: 1058 - DNA, 32306 bp, Homo sapiens
  source 1..32306: mol_type = genomic DNA
gcgggcggcccggcggcctcctcttccaccgcccccccaaccactacccccccacgccctccccggtgtctgtgtttctctctctggtcggaggcggcggtaatggcggatggtgggttgtggcgccggcggcggctgctgtgagggacgatgagtgcctccttcgtgccgaacggggccagcctggaagattgtcactgtaacctcttctgcctggtgagtgccggggccggcgggcgccgagggaggggggccgtgaggtgcgcccttgggccgtgggggagggggccgggtctggtccagatgcccgagtccccgggcgaggcccagccggagccggcgccctgcgaagctccgcggccaaccccgggagactgcgttcgctctcccacggtcccgggccctgtttggggagtgttggcattttttctcgtcttctttcggactctcctcttcaccgtagtctcgtcctcaacttgagctccttatctggcaggacagtaacctttctctctctcttaactgttgcttttctgcttattggccttgtatcccagcttcacactttccattattgcccctgctccccaccgcctttatgtctcatccttttaatttggtttccccatgtaaacaggaccccagaacttatgccccagaaacctgtcttcgttttacattttttttgtatgagtcaaactaacgcaaggttagtttcttccttgggtgacttaagatctctctgtaaaaaccagtaggtgccatttcatatgttttctttttaaactttgaaaacagtttgccatttttgacaatttctagccatcttgcttttattagaacataattttttttgtgcgagtgaagggggctaatggacgaggtgctgtggttttgcactgtttctatatttattgtgttttgcttgctttttcagaatgttttgagcaggctgctcccttgtttgattgaaatgaaaagtccagagaagctgggtgtagggatgaccattgtgtaggttagcccaggtctggtaacatccaacagttgagactttcaaaagtaccaactgttgcaaataacttggcctgtgtgggacagtagctgagcttcatcaatgactttaagtttgggtgactttattttttcattttctcctttgtgctatgagaaatattaagagtatatgataggtaataagtgagttaagtgggcggagcacaactagttggcaagtgtaaactgccagtcatgtatcagcagtttcatttttggcaccttatgctttgcacctttaagttagattaaattattgaattcctcttgaatttctttctggatgctaaattgagatctttcatactctatcctcttctacagtatgtttttcttttcaatgtccattaatcagcatctcttcacgtataatacgacatacaccaggttttgtattctatcttatccaactcagtctatttttgaaacttttaggatcaggctctttgaagatagactagcacaaatctgacagttctttgtgagcagctatttgacttttccgacaggggtatgtgtgaagaattaacatagatttttttcaggacttgttcagatgtcttttcattagagacattacttctgtaaatgtggaataaaaactcgtgatagggtctttaataattgattttcagttaaacgtttgacaccaatgaataaatgtgaccatttaggacagagaaaaatgtactctgtttgtatattgaagtgtgtgtgtctgtctatatttaacttcattcagtttcttttatttctacttggagtacatatttgcttgctattcagtgacatggtggtatttatttttaactgtgttcttctccctaaaattgttggttgttgaattataaagtcattttttttttggttctaatttgcattcaatagctcaagcatatattgaaaaattgtaatgtcttaacgaaataggagacatcgtatggagtacttttgtgaatttgagtgaatatgcaataataaaacatcatgctttcttttcttcaggctgacttgacgggaattaaatggaaaaaatatgtatggcaaggcccaacttctgcccctattctgtttcctgtgacagaagaagaccccattttgagcagttttagtcgctgccttaaggcagatgtacttggtgtttggcggcgagatcaaagacctggaagaagagaattgtggatattttggtggggtgaagaccccaattttgctgaccttattcaccatgacttatcaggtgaaagaaactttccatttctaattaatgatacagcaacattgtatacttctcccagaatatcatttgtattacaaagtaagtttgtttttgtgggacacttaggtaggaggccagataaaaattgagcttcatgttttatttcaccatgattattttattttactcaaattatccatgttatagctgggttttttaggcttgaatgactttctccttttaccacctctcttcttaatttctcacgggtagttagggtccaaggaaggcatgccacattaatctcaaaaaatggaatcaggaaacagagttcctaacaaagtcatgtaatagttttgaagccagatgtaacttttgagtcacttcagccactgtcaaagttgagtcttttgcattaaatgggcagatgattctaaaagtactggaaatgtaactatccttgtgtttgtgtgtgtgtgtgcgcgcatgttttaaggtatgtaagtattttgttactgtcatttgtgctgtttgattaacatatgaaggcatatgttaatttagttatttttggaaagtgactcatatactgttctgtcacatactcaataagagacaagtgccaacttgtttagcttttataggacatgggatcataatctaaaaggttacacaaacaattttattatgagcaaatcaatgtgattacttccttattttcttgacttttaggaccaaatgctactttagaaagagaaactatagcttttcataataattactgaagctttgaactgtcaaagtcagtatttactgaatcttagataataggaatgtaaatgattggttgtatgctataaggttccgaacgcttcagtaagatagtttgataatgatttttgatagataaatttaggatttctagataatttttttaaagttcttgtttgaaattgagtactctgaagtttttgttattgtcccaatgacctataggatctattttatttctggatagaatgtattctaggtgtctgtatcttgaactggtacttagtaagaccaacatttatgtaggaatgtacgtgttacatttgtatgttttgataattgcttttcacattctaatgaacatactctcccgtgataattactatttttgagagtgattgcatttcttcaagaaagctttccagcttttgtagtttttctaatgagatgcctgctgcagagtctagtccctagttctttgtatttaatgtagttctaaatgtgtaaaatgatgtgtgtatgtatatacatatacgtatacatgatgtatgtatatatagtagttttagcaagataatgccttctaatcatgctaaaagctccattttctttcattgacttggatatagtattgagttattttaatcattaagtggtcataaaaatcaccttactagaatgtttggagactatctaacattgttgaaaaactataaactattgataaaatatatttgttgataaaacataattatcaataaaactataatgctgacttaggggctttggtcttaataaagttggcagagcatctaaacagacttaacagatctttcttaaagattccatgaaatacactttgtagaatcaaagataattttaagagatatataatgaggccgggcgcggtggctcaagcctgtaatcccagcactttgggaggccgagacgggcggatcacaaggtcaggagatcgagaccagcctggctaaatacggtgaaaccccgtctctactaaaaaatacaaaaaactagccgggtgaggtggcgggcgcctgtagtcccagctactcgggaggctgaggcaggagaatggcatagacccgggaggcggagcttgcagtgagctaagatgcggccactgtactccagcctgggcgacagagcgagactccgtctcaaaaaaaaaagagagagatataatgtttaatttttttttctttttttctttttaagtagagatggggtcttgctatgttgaccaggctggtcttgaactcatgaactgaagtgatccttccatcttaacctcccaaagtgctgggattacaagtgtgagcccctgcacctggcctagttttaccataatagaaataatattgtgaaagttaaaagactattaaagttagatgtgagctgctttgatgtatattgttaaaagtcagttttttcttctaggtttcatgttaccagtcagatatgttttctccactgaaactaggttacagtcttaaacgtttttctctagtttagctttgatttttagcataattttcaaaaatcatagttacttgtacctttaaaatagagagtgatcagctgggcgcggtggctcacgcctgtagtcccagcactttgggaggctgaggcaggcagatcgcagggtcaggagatggagaccatcctgaccaacatggtgaaaccctgcctctactaaaaatacaaaaattagctgggcatggtggcacgtgcctgtagtcccagctacttgggaggccgaggcaggagatacgcttgatcccggcaggcggaggttgcagtgagctgagatctcgccactgcactccagcctgagcaacacagtaagactctgtctcaaaaaaaaaaaaaaaaaaagatagtgatcctgaacgtgaatgaaagtaattttggggggaggttgggtgtttttttttttttttttttttttttttggaaacagagtctctgtcgccaaggttggagtgcagtggcgccgtcttggctcactgtaggctacgcctcctgggttcacgccattctcctgcctcagcctcctgagtatctgggactacaggcgcccgccaccacgcccggctaattttttgtatttttagtagagacggggtttcaccgtgttccccagactggtctcaaactcctgagcgcagtctgtccacccgcctcggcctcccaaagtgctaggattacaggcgtgagccaccacgccaggcgtaaataacttttaaaaatttattaaagtgaagtgatggaaatagtaaactgaaatacaattaggagtggtatgtgatcgtatttattgttccaaagcttgtcctgtactgttttagtttgcatagtcagtggtatttatatgttttagctttttttttttaataaaacctgttattaagaatgttgttacttaaatcagacgtatcttaaagaataataagatcttttcagatggaatatatttgttttgcccttttctttgctctggggacagcgtctgcctccctcttggggtaattagtctgcctgtgtctctctagctaacccctttttcatttcttcccatctgtggcactctatttccttcttttaagctcccctgagaagagagcagctggacagtacagggtagcatcagctgctggaggcagtcctgggttccaagtggaggtgtagcactgaggaaaggggtaccggaaggacccaggtggtaactaaaaagctggttaatttagcttgagcctgctcttcacagacagtgtccttctgtttgggtcagcacacaccacatcttgttactgaagtgtttttgattatggtgataatattgccctcgtttttcttggtagtgggggaagagggaaatatttttccaaagattagaattctgtttttcttaactggaatattcaataacagaaatacagaattgcctttgtttgacctccttagctcctttgtgtcatgcagtgtattttaaaaaattaactaatgaaccaatattgatactttattattaactaaagtatatatttggatttcttttattgttttttgcctaatatcctttttctttcctaggatctcatctaagatacccatattatatttaattgtcatgtctctttaggctttgctagactatgacagtttcttagactttccttggttttgatgatttcgacagttatgaagagtctgctcagattccatagtgcattttaaatttcagtctctcttatgtcacttagcatttgtttgggttaccttcctttcaagtttagctgatgtgtagaaatagaatgtaaacttatattgctaactggtagagatccattacagcaaatcaaatctgatttaatacatactttaaaccctcagttactcattttgtagcagtaagtcaatactgttgagcaaagtaatttgcagaagccaggtgatttttggatcaggatttgtgctaactggtattagcctaactataatatttggaaagatacttgttcagaaaaaaactcttgaattccaaagccaaacatagatgattttcttactttttgttttatcctctataggataatgattagttgaatcggtgtggatatgttttgatacaaaaagattagagaataaaactcctttggggttaacagcttttttctttctttctttttttttttttttgagatgaagtcttgctctgtcgcccaggctggagtatagtggggcaatcttggctcactgcaacctctgccttccaggttcaagcgattcttttgcttcatcctcctgagttgctgggactacaggcatgtgcctccatacccggctaatttttgtatttttagtagagattttagtgggcgttttgccatgttggccaggctggtctggaactcctggcctcaggtgatctgcctgcctcagcctccgaaagtgctgggattacaggcgtgagccaccatgcccagccccttttttaaaaaaaattaaattttgtagtttgtttatggttgtgtgatagtgggtgaaagaggtatgaaatgggtaatgggaaaatcttagctcggtccctctggtcaaaaatctctatagtgggtaggactggtacttttaagtgtactgttaatttgcttcagagcaaggttgtttcattttcattaatgtgttcttgaaggagagttttctccgtatttttattctgtgttctaacgtttttggaattcaattgctgtcatcattgacttttattctttccctttaaataaaaataaaagcaaaaactgcgtcctctcccgtttgtcatcttaaaaaaatcatagcaagttagactgtgatgagagtctttgagaaaactgataccttgtgaactaaaaaaactcagggctaaaaatatttcttctttttcctggctcctgaggtctgtaaagtagattttagtaacatgttcagatagttttattataccagaattttgtcacaatgaatagtgctcaaactaagtggactattgttctgtatttaattttggatgtttttattgaaggatattaactatagtggactttaaccttaaatgacagatgttaatcggattgacagacagataaacagccaggcataggaatctagtcccagccaaactaaaacattgttttgtgccccaggtaatctaaagagagtaagtaattcatttctactgttgtaaaattaacttgtgatgtggtctgactcttcaaattggctagtcttctaggtgacaacttcatttgctgcatactgttctttttgatcaagtgtattttctaagttttcaagtcaaacgtaacatactacgctgttcttaaatcagtttttcaagttttgccatagataatgatgcagccaacttaaggctctcagtatatttgttgaatgtgttggttattaatgattattcattagaaacactgatctagcatttaaacatttctctttatttcaggaactacatggaattttctaccatgttaatttttgagccattcattagcatatgttacattttaatagtttagcaaaattatacaggagaagattcgttttttaccactgtggatatatttaaagatgccagttttgagaaaaatgttgagtgcacggtgtatttgcttttttggttgtgatttttttttcccttttttttttttttttttttttgtgacggagtctggctctgtcgcccaggctggagggcagtggccggatctcagctcactgcaagctccgcctctcgggtttacgctgcctcagcctcccgagtagctgggactacaggcgcccaccacgtcgcccggctagtttttgtatttttttttttagtagagacagggtttcaacgtgttagccaggatggtttcgatctcctgacctcgtgatctgcccatctcggcctcccaaagtgctgggattacagacttgagccaccgcgcccggcctttttttccctattgatagataattattttgatgacttatcacatgctttggcactactgtattctgtatcttcaggaagaaaatatggtaatcaaatttagcatttgtattttcttccaataaatcatccatgaaaatttcaagaaacactgatgattaagaattgtaatgctaatagtaatagaaaagtactaagaatgcagagttgaaaactttgttttctctacaagaggaggaattttttttttttttttgtagagatggaggtctcactttgtcactcagcctgcagtgcttaatcatagctcattgcagcctccaactcctggactcaagcaatcctcccacctcagcttccccagcagctgggcctacaggcaggtgctactatgccccactaactaaaaaaaagttttttggagtcagggtcttcctgtgttgccaggctagtcttgaactcctagcttcaagtgatccttctgtcttagcttcccaagtagttggaattacaggcatgagtcattgtacctggctagaggaggaaaatatttaaatggattaagcagactttttctgttaggctctggttaagttcagaagagctaggtgttcccttctccttcccctccctattataatgctggtgttgagattcaataacttgtttcaattagtgtaaatagtgcatatcactatgccttgggtgggttggttgtaccatttcacttttcatatctgaatacaacatgtagagagtacttttattaaggttattagattgtcaggatattagaagcttggctctgtaggcttcttgtttctaagtgattcccaagaaaaccaaaaaccttcagactttttattgagcattattaggacttattctcatttttctcagcaacaaaatatgaaattatattactttagtgtaatggttgcttagttgcttgccatatagatgaagatatacttcagagatatgttgggtttagaaaacctcaacaggtggtctctacttgtttgttttatgcatagctcccatttagtgttaatgagaattttgggcattggggacataagatgcccacgccctttgaaagcattagaataatgagggagagatgcttgaagattaatactgactacttttctaaaccacattcaatattcctttttttttttttttgagatggagtcttgctctgtcaccaggctggaatgcagtggcaggatcttggttcactgcaacctctgccacccagttcaagtgattctcctgcctcagcctcccggatagctgggactatgggtgcatgccacctcgcccagctaagttttgtatttttagtagagatggggtttcggtatgttggccatgctggtcttgaactcctgacctcagatgatccgcctgcctcgacctcgcaaagtgctgggattataggcatgagccactgcgcatggcctcacattaaatagtcttaattcatttaactgcaggtttcattgaaatagattttacaaaataaaaccatacaattttcagaattttatgtgaaaatttataaattattgtgttttagcttttactattgcaaagtttttttttgttttttttttttttttttgagtcagagtctcgctatgttgcccccacaatggagtgcagtggcgtgatctcagctcactgcaacttccacctttcaggctcaagtgattctcatgcctcagccccttgagtagctgggactacagctgtgccatgcacggctaatttttatatttttagtagagatggagttttgccctgttggccaggctggtctcgaactccgggcctcaagtggtccacttgcctcggcctcctaaagtgctgggattacaggcatgagccaccacacctggcctaagcctccctgacagcaggcgtgagccaccatacttgtcctcagcctcccggaaagcagatttttttatttactgtttttgggaagaaggcaaagtcattctctagttttaaatgaataatttattcgaagtttataacaactgtacaacttttgatacttataaatggtaactgtgtcttgggtctttgatgctttaaaacttagatagaaaaaagatgttggtagtggcttctgtagaacaagtgttataaccatcagaaggtagtgatttttgaaataaaaggtaataaaaataaaagatactaaattgattataaagaggtgaagaattgggagatattcctaacataattctgttggaattaagaacatgtatattctagtagtcataagtctcataatttgaggtaaaagtcttaatgtagctgtttaattttgaaatggtaggacctcattaaattgaaagcagatcaattgagaaagattattttctcttttttttgttatcaactcacaaatatgcttgtgagctagacgtttaattaattaaagtgaagtcactgtgtgccacttctctattctcctagtctaatattttctttaataaagtgaaacctttgggcaggcgccgtggctcaagactgtaatcccagcactttgggaggccgagaggggcggatcacgaggtcaggagatcgagaccatcctggctaacacagtgaaaccccgtctgtactaaaaaatacaaaaaactagccgggcgaggtggtgggcgcctgtagtcccagctactcgggaggctgaggcaggagaatggcataaacccgagaggcggagcttgcagtgagctgagatccggccactgcactccagcctgggcaacagaacaagactccgtctcagaaataaataagtgaaacccataaatgctttggttttaaatgacagtagataatggtgtctttgatataatagaatgtcaatttttcatatttaatacttatgattaatattagacttaaaaaattcttctattcgaattctgatatattgtcattttctaaagcttattccactttttttcccctaagcttaccttttttgtttttgagactgaatctcactctgtcccaggctggagtgcagtggcacgatcttggctcactgtaacctctccctctcgggtgattctcccacctcagcctcccaggtagctgggattacagggctgccctatgacgcctgggtaatttttgtatttttagtagagagggggtttcaccatgttggcaaggctggtcttgaactcctgacctcaggtgatccacccacctcagcctcccaaagtgctgggattacaggcgtgagcaactgcgcccagcctaaagcttatttaaaatgaaataaaataaaataaaataaaattagttgctttgaaagacttgactatcatttaggaaaaaaacataaaatcaactttaatctttgcagtagcacagaatttctagtgcagttaaagtctactgtcatgctttttaattactgtttgttctacccatttgttgtataagttgtgcctataaaccatgtgtaattcttaatacatgtctttgcttttattcgaaagctcatattgtgtctatttttctgtgggtatagcgtatgcatgtttggtgttgaattgagaaaggtttgtcttttatttttacttttacttaaacattgaacacagataacccatatttataaaatgtttataaaggtatatagtctatagaaagagagttaattatatttagactaagcaatttaaaatcttgtaatgaaagttaaaatgctgaagcagtatcattatttgtagcacgatttattgaatgctttgtgacagatatgaaatggatagagtatgaaaaacattttttctgacctacatccagacttatctcaaaatgactgtgttaatgtttttttggtaaattaacttgaagtgattaatagatttgctggcaaaattgaagctgtatagttagtgaagatagctataattttatatgacagaagtgccatttacaatttaagtctttaaatttttaaatttctcccccaagtaaaggatcctatactgaataataatcgtgggaataatttggttgaaatgagacctaaggtggctgatagtgcactgcttgttaggctctgtgccaacagcttcctttttattcatcacttagtgttacagtggagtcatggattagaatgctgatggacatgaaatgttttgacttcaattattaactggctaatttttttggcaggttgagtgattggggggattaggacaaagtaacaagtgagccagcttagaaattggcatcataggtatagagtgcgtttaatattttccaggttttgcaaacaagcgtccttttcattaatacaggaaccaattcagtatgttcatgatgtcattgaattttataaggtggaaaaatacttttcaggtaatttaatagaatatatggcacttagatcttttattctttatggaataactttgaaacctcctaatgtctagagatacattgaagtgattgtagcttaatattctgggataagctagtgttgatgagtatagagtttaaactgtaaccttttttacttggctctgaatagattatagtgctactattttacttactgtttccttcgtttctcttttagaagaagaagatggagtgtgggagaatggactttcctatgaatgccgtactctgcttttcaaagcagttcacaatctattggaacggtgtttaatgaacaggaattttgtacgtattggcaagtggtttgtaaagccttatgaaaaagatgaaaaacctataaataaaaggtaagctatcttaaattctgatgtgatatttctttagatttgttcctttttgtatctttacagagaatgtgggataaaacaagctaatatcatacaggcatattcaggaggttatcagtgacaaaatactagatatagtcaggttttttgttttttttttttaaccactttacacacttccctttacactctttaagaattttcttacagtaggaataagctgtattttaatacagtggcctaaattttgatttgggatgatagacaaaatatgggatgaaagcagatccttaggcatggaagtgtatgcccagcactctgatattaaagttaagtaacattaacacctgttaaagatagtgatctgtgagtatgttttggattaagttaacccttcttattcccagtctctcatttccctttaattaaagtaatttaaatttgtgttttctgtataagaccatttactctttgagagcttataattttcttgagcaatgaattaagcaatttatgacactaattattagagtagttgcagatagaggcacagaagacttatgatagatacctccttctcctgtgcaattaaaaccttcaggttactacgcttctctgtgatttagataatataaggcatagtctgtcagaagatttaagttcccagcagtcattgagttagtgagacttcaagagagatgaaccagtggcaagtaagatgggatgtggggaagagaaaattaaagggaacttactaatttttcctgaaaggtgtaagaggatgtgaagtgaacatttggttgagattgtaatcattttgaggtctttcatgtcatatatgcgcatcttttttcatgtgcacctggaggttttttttttcttcttgaaactttttagttttagtagactggatgagtagataagcctggataaataaaggtgctttcattttttttcctctttgaaaattaacataaacctttattgttaacaaaatacttgtataagtttggaatgcattcagctgaaaatggcagaaaaacattaactacttggcttatgtagggattgatttttctcagtagcaaggagtatggaggtagatagtttagtactggtatatctgttcaataatgtcatcaaggattcaaggttccccagagttttctgctgtgccatctttacatcttcgtggtcctcccgtgtgttgcacctccagacctcacggtgaattccaggcaggaagagaaaggaagggaggaagtaagaaagtgtggcacctgagtcagaaagtaaattattttctggaaactctagctgacgtatctttggccatactaagagaaacagatatcttttatttggaaacagctgctctgaacaaaatgaagtttttgttagtaagaagaaaggggtgatagatagataccaaagatcaaagaagtggaaatggatattgggtaggcagttagcaatatctgccatatacatttatttatttatttattttgagacagagtctcacactgttgcccaggctggagtgcagtggtgcaatctcagcccactgcaacctccgcttcccgggttcaagtgattctcctgctcagcctcccgagtaattgggattacaggcgtgtgccactacacccagctaatttttgtatttttagtagagacggggtttcaccatgttagccaggctggtctcaaactcctgacctcgtgatctgcctgcctccgcctcccaaagtgctgggattacaggcatgagccactgcgcctttttttttttttaaagagagactctcagtctgttgcccaggtgggagtgcaatggtgtgatcttggctcactgtctcagctcactgcagcctccgcctcctgggttcaagtgattctcccgcctcagcctcctgagtagctgggattacaggcatctgccatcacacccagctaatttttgtgtttttggtagagacacggtttcgccatgttggccaggctggtcttgaactcctgacctcagatgatccacccacctcggcctcccaaagtgctgggattacaggcgtgagccactgcgcctggcctatttatgtatttattaagttctgggatacatgtgcagaacgtacaggtttgttaattaggtatacatgtgccatggtggtttactgtacctgtcagcccatcatctggattttaagcccagtatgcattaggtatttgtcctgatgctctccctccccttgctccctatcccctgacaggccctggtctgtgatgttcccctccctgtatccatgtattctcattgttcaactcccacttatgagtgagaacatgtgtttggttttctgttgttgtgttagtttgctgaggatgatggtttccagcttcatccatgtccctgtaaaggacataaactcattcttttttttttttttgagacaaagtcttgctctgtcgcccagggtggagtgcagtggcacgatttcagctcactgcaacctccgcctcctgggttcaagcaattctcctgcctcagcctcccgagtagctgggattataggcacccgccaccacgcccggctaatttttgtatttttagtagagattggatttcaccatgttagccataccggtctcgaagtcctgacctcaggtaatccgcccacctcggcctcccaaagtcctggattacaggcatgagccaccatgcccagccgaactcattcttttttgtggctgcagacccccgtctcttttaaaaaaaaaaaaaaaaaaacggtgggcacagtggcacacacctgtagtcccagccactctgaagactgaggtgagaggattgcttgagcccagaagattgaggctgcagtgagttaggattgtgctgttgtactccagcctgggcaacagagcaagaccctgtcttaaaaaaaaaaaattataactttttctttttgagataaggtctcttactttgtcacccaggttggagtgcagtggcacagtcatggctcattgcagcccaacctcccaggctcaagtaatccgcacacctcagcctcacacgtagctgggaccacaggtacacgctaccacggctggttaatttttgtagattttgtagagacaagatatcaccatgttgcctaggctggtcttgaactcctgagctcaagctacccaccttcttcggcctcacaaagtgctaggattataggcatgggccaatgcacctggctggaaatacacctttttttttttttttttttttgagacagagtctcactctgtcgcccaagctggaatgcagtggcgtgatctcggctcactgcaagctcagcctcccgggttcacgccattctcctgcctcagcctcctgagtagctgggactacaggcgtcagctaccacgcctggctaattttagtatttttagtagagacagggtttcactgtgttagccagaatggtctccatctcctgacctcatgatctgcccgccttggcctcccaaagtgctggcttaacaggcttgagccaccgtgcctggcccaaaaataaaacttttaactggagattttcatgaatccaacagattctgcttgttatttaaccatgtaattgagcactagtgtttttccatgggctgacccatttaggaggggaactaaattaagattgtattttattagtgaagtgttaccagaaatagtgtatgctctttcgagttactcttgaaccatagttgtggtataaaaactgactttattcggaaagataaatgctggtcctcaaatctcttttttgcaggacctttcttaccctttttccttctatgtaatagcaagtaggagaaaaaccaagcaactaagtctgtctttgagttatgatatgggacttcttttctgttgaattcagtggaatgatatagggaaggtagataaagattgattataaattaatacgtctctagaccattctgaaacataagtatcatatagactgtttttgtttactaatcaattaacttttggtataagtattctgaaaaaagaacaagagttgtaaagaaagaaaatttatgctgtgaaactagtttcacctgaacaaaggagaaaataatattccttacatttttatcttcttcctttctttattattttttttgttttgttttgtttttttttgagacggagtctcactttgtcacccaggctggagtgcagtggcaccatttcggctcactgcaagctccgcctcctgggttcacgccattctcctgccttagcctcctgagtagctgggactacaggcacgcaccaccacgcccagctaattttttgtatttttagtagaaacggggtttcaccgtgttagccaggatggtctcgatctcctgacctcgtgatccgcccgcctcggcctcccaaggtgctgggattacaggagtgagccaccgcgcccggctatcttcttcctttctttaaaatttttacataaaaattctcattttctgataatctggacctacatgtagttgtctgtttaactttaacagtctttagggactgaaagagaggaaatggaatcaaattcttgggatacagctaggttacctttaaagaatcccacaagtataagagtaaccacaggaacaaaccagtcttcagttaattggttaaaagaatgatgaccagtgttttcttgaatagtttaggtgttttcctgtattgctggggactggatcacatggcagacattgagttttctagtgagcccacaagtaaatgggttgtattaagtaccgttgacttaatgtaggttttagagtcttctataaaaggtattctgaacttgtgatgtttgagagtgcatttgaataagattatcttgaataagaactttcttttttttttccattttttttaaatagagacagggtcttgctttgtgcccaagatagattgcagtagcacaatcaactcattgcagccacaaacttccaggcctaattggttctcccacctcagcctccagagtagctgggattacaggcacacaccacctacgcctggccaaggactttcttaagattatgtttggttaagctttttgtcatgttgaatctgttgtagccatttagctgagtgtgcagtaaagtttatttagcaaaaatatgttgttaaatcttttttgatgtatttatgtaaaatagttacctttaactccaattttaaaaggcaatatagggtagacgtggtggctcacgcctgtaatcccagcactttgggaggccgaggcaggcagctcatgaggtcaggagttagagaccagcctgatcaatatggtgaaaccctgtctctactaaaaatacaaaaatgagccaggtgtggtggcacatgcctgtaatctcagctacttgagaggctgaggcaggagaatcacttgaacccgggaggtggaggttgtagtgagcagagatcgcgccactgcactccagcctgggcgacaagagtgaaactccgtctcaaaaaaaaaaaggcaatatagagtattacatgttatatatgtgtgtttgtctgtattacattatgtgtatacatatcgacatacaataggatataataaatccttgctggatataacataaaataggattaaatgtttggttcaatatgttctaagcctttgtattagaataattagagccctggaattaattagtagtaaagaactttgtccacagagagtgataaatttttggttttgtgggataaagcagtaaaagttcacaggaaggaaaggatggctattgttaatggttattgtattgggcaatgtagatctagaacattttcatcattgcagaaagttatttttttcgggtggtattgcttacacaagaacctttatatttataattaaaatggtactttcggtacttcaataaagaaaatcatcaaatttttttaaggaagtaaatgaaagaatatgctttaaatttcaaccataaagctatgtttattttctgccgtatgtatagcttttacattatctcattatctccaaaactgattaaaaataggcaccatgagatgtaagtccccactggaaatgttttattaactgttagtagcattaggatgtcctttggttgggtttctcactgtctctgaaaaggcaaatttctagagaagctaggagctattgctattaggtttttttatggactcatttcctttcttcctgtcatctaatgtagtactgtccagtagaagtataatgtgagccacataggtaatttaaaattttcttctaggcacatttaaaaagttaaaaaaacctaaatgtataggcaaaattaattgtaatatatttttaaatgtagtatgtccaaaataatatcatttcagcatataattaaatatacagaagatattaatgaaatagtttactttttgtactgtctttgaaattaggtttgtgtactatgcttagagtatatctcagtttggattttaagtcaccagtagttatatgtgtgtattggctgttgtatttacaacagagttctagggctttaagcccagttgaacttggtagtgtttgttggtgaaacaacagtgttctctgttggtcagtgaacccttctggaattgtatgctaaattgtgagtatgctctagaatctcaaaggcaagaagaatctcataccttgcatcagtcagggtaccaactctctgctaaattaggtgtagttacttcagcagactggatgtgcctttttattgttttccctgtagcctacctatgatgttttgtccttaatgtctgtcatcaatattattatgtatcatttctgaagtcttaagtgacgatgtcactagaatttgcgtggtcagttttctacattttcatgccttctagaacatttatgagaaaaattaaatgttaagaaagacttttctttctcctatttttcctccttgttgagattttcttaccataatttttctttctttctttctttttttgttttttttttggagacagggtcttgctttgtctcctaggccagagtgcagtggtgcagtcttgactcactgcaccctctgctcccaggcacaaacaattctcttgcctcagcctcccacatagttggtactttcaggagtgcgccactacacctgactaagttttgtaatttgggtagagatggggtttctctgttggccatgttgaccaggctggtctctaactcctggcttcaagtgatcttccagcctcagcctcccaaagtgctgggatgacaggtgtgagccaccatgcccagcctttcttaccataatttctatgattcttactgtagactcttacaaatctgtccaagctcatacagctatcaagtattggagctgcattttaggcatgaaaaatatgagatagattattgaccctgtagacctgtatatctcctacacatatttttttttaagttataggaagtagtaaaaacatagtacttagaaacaacaataaaaagcagcattttgcagaacatttgaagtggtaaaccagaataatgttgttgctttctaagttgttttttttttttttttgagacggagtctcgctctttcaccagactggagtgcagtggcgcagtctcagctctctgcaacctctgcctcccaggttcaagtgattctcctgcctcagcctcccaagtagctgggactacaggcgcgtgccaccacccccagctaatttttatatttttagtagagttggggtttcaccatgttagccaggatggtctcgatctcttgacgttgtgatccgcccgcctcggcttcccaaagtgctggaattacaggcctgagctaccgcgcccggccgctttctaagtattatttaccgtataatataagtaatatgttcactgagcgagcagaaatatgtacaggatttacaggtaagatgttaacttctggagtttagtgtggatcttttgttcatggagctatgttaataatacctgatactggccgggcgcggtggctcacgcctgtaatcccagcactttgggagaaatcacgaggtgggtggatcacgaggtcaggagatcgagaccatcctggctaacacggtgaaactccgtctctactaaaaatacaaaaaattagccgggcgtggtggcgggcgcctgtagtcccagctacttgggagactgaggcaggagaatggcgtgaacctgggaggtggagcttgcagtgagctgagatccggccactgcactccagtctgggagacacagcgagactccatctcaaaaaaaaaaaaaaaaacctgatactggtattatacctttaaatttaagaatttaaaacagttactctgaaggctatagaaatacaaattaatgattcccaaacttgtctggaaacttgtctggatgtgggaatcacctggagagcttacaaaaaattattgatgcttgtgtcttaacctggggctgtaatctgggctttggaatttttagaggatcctaaaaatgtaagacaagtttagaaacttgaattcacggaataaaaataatctcagaattaagatggctaggggaggctgggcacagtggctcatgcttgtaatctctgcactttgagaggccaagacaggaggattgctttagctcaagagttcaagaccagcctggacaacatagtgagacctcatctctacaaaatataaatttaaaaaattatctgggcatagtggctcacacctgtagtcccacttacttggttggctgaggcaggaagattgcttgagctcaggaggtggaagctgcagtgaattctgatcacgccactgcactccagcctgagtgacagagcaaggccctgtctcaaaggaaaaaaaagatgaatacagtttttttattgtggtaaaatgtacataacataaaacttaataatttttcggtgtacagttcagtggcattaagtacgttcacgttgttaaccatcaccactatctgcagaactttttcatcatccgaaactgaaagtctactcataaaagagtggtagctcttcaattcttcttttcttcagctttgtgtaaccaccattctactttgtctagaaacttgactcttgtaggtacctcatatgagtggaatcatgtagtatttgtccttttttgtctgggttatttcagttagcataaaatcttcaagattcatttacgaaacgtgacagaatttcccttatttttaaggctgaataatattccattgtatgtatatatgacattttgtttatgtattaatctgtaaatggtatttgggttgttttcaccttttggttattgtgaataatgctgctataaacattggtctgcacatctctcatcaagtccctgctttaagttcctttgggtgtatacccagaagtggaattgctggatcatatggtaattcgaagtataatttttggaggaatttccatactgctttccatagtggctgcactattttacattcccaaaggcattgcagaggtgttccattttttccacatcctcatcaacacttgttatttcctgtttttttttttaaagctatttttatgggtgtgaggtggtatcttactgtgttttcggtttgcatttctctaatgattagtgatgtgttgagcatgttatgtgtttatcggccatttgtatgttgtttttggagaaatgacggttgaagtcttttgcccatttttttaattggttgatagggtgtttagagtttgaagtcagcattccctttactagtattatgattttaacacaagccatttaacctctttgtacctcagattctctactcgcaaatgggatatcatttttctgtagcttcttaatacaaatgctagaaataggtttgatgtggcactgcctaatctagcatacgtatggaattgttgctgttagagcagctatctttaatctataagcatgtcttttctgttttagaaataatcttttgattaatttcagtacttaatttgaggaacatttttttccacaatggaagattattcaagtttcatttataaaattctgcctcattcataactttttgttttagatattgcagtgtaagctcatggagagcaagtgttttctgcagtcctttatagtagctaataatactttggattcttattgtagtgatatgtttttgttttaactctacttttctgagtgttaaataccaaaaatgtttgctgggatgatatgaataacatttctccttggaaaaaaagcacaaccgaattcactgtgttggtattttctaattgttttataatattctctgactagaatgttacctttaatataaggatttcagagatttgggtgtggtggtgtacacctgtagttccagctacttaagaggctgcggcaggaggatcacttgaggtcgggagtttgaggctgtagtgcctcacgactgtgccagtgaaaagccactgcactcctgcctgggtaacatagggagaccgctgtctgtttaaaaaatttcaggtcggcacagtggctcatgcctgtaatctcagcactttggggtgccaaggtgggcgaatcacctgaggtcaggatttcaagaccagtctggccaatacatggtgaaaccccatctctagttaaaaaataaaatacaaaaaaactagccggacgcagtggcaggtgcctgtcatcccagctacttgggaagctgaggcaggagaattgcttgaacccaggaggcggaggttgcagtgagccaagatcatgccgttgcactccagccttggtgacaagagtgaagcggtctcaaaaaaaaaaaaaaaatctctgctgggtgcagtggctcatgcctgtaattatagcactttgggaggctgaggtgggcagatcacttgagggtcaggagtttgagaccagtctggccaacatggtaaaaccctgtctctactaaaaatacaaaaattagctgggcatggtcatgggcgcctgtaatcccagctactcaggaggcagaggcagaagaatcacttgaacctgggaagcggaggctgtagtgagccaaggttgcatcactgcactccatcctgggcaacagagcaagtctctgtctcaaaaaaaaaaatctcaaattgtatcacatatttagaatattgtttccctccagtatcacatacaaacttggtttattttaaaccattgtctgttacaataaaatcagactattgtatactgggattatatgctagcagtgtaggaggtagtgatttttctttgatcatagaccgctgggattaagtgttgttagtaaatagggtagtggcagatatacagtggtagctgagaccattggttacatgttttgtattttggtatattggattgctacaaagactccttggagaccagtttatccctttacatcaagaagccaaattttattttcttatttaaaagataaaatggggccagatgaagttagctcatgcttgtaatctcagcactttgggaggccaaggtgggggattgtttgaggccaggagtttgaggccagcctgggcaacatagtgagcccccgcccctgccatctctagcaaaaaaaaaaaaaaattaggtgggtatggtagcgcacacctgtagtcccagctactccagagggtgagatgggaggattgcttgagcccggtagtttgagaccgcagcaagctacgattgtaccactgcactccagtgagaacctgtctctgcaccataaaattaaaaaataaagtgggtaagtgctcactggaaagagtgttaggaaagttgaaagatgacttttatgattttatacatactagagtaaactttttttctaaataacatttaagataggtcaaattaatgtatttttaagcatttctgatattacaatattttcaggaaaatagatttttaaaatattaaaaatgcttttaaaataatttttaaaatcttttaaaatgctttgtcatgagaaaaatccattttaaatatcttttttttgtttggagacgagagggcggtggtgtcatcatagctcactgcaccctcaacctctcaggctcaaatgttccttctacctcaacctcagcctctcgagtagctgggaccacaggcatgcaccaccccacctggctaatttttaagttttttgtggagatagggtcttactgtgctgcccaggctggtcccaaactcctgggctcaagcccaactcctcttgcctcagcctcccaagtgctgagattataggcatggctggctgtttttaaattatcttatttaatatttcgtgtataaaatgaaacagttgaaagctgtgttttttaagaattatactccactgattaaaggaacagtaaagttcaggtctcctagccgctttgtcttttttttttttttttttttaatttttgagatgaagtctcactgtttcccaggctgaagtgcagtggcaagatctcgattcactgcagtctctgcctccctgggttcaagtggttctcctgcctcagcctctcgagtaactgggattacaggtgtgtgccaccacacccagctaatttttgtatttttagtagagacggaatttcaccgtgttggccaggctgggctcaaacgatctgcctgtcttgccctcccaaagtgctgggattacaggcctcttttttttttttttttttttttttttttgagatggagtcttgctctgtcacccaggctggagtgcagtggtatggtcttggctcaatgcaacctgcgtctcctgggttcaagcgattctcatgcctcagcctcctgtgtagctgggattacaggcgcacactaccacactcggctaattttttttgtatttttagtagagatgaggttttgccaagttggccaggttggtctcaaactccttaggtgatccgcccacctcagcctcccaaagtgctgggattacaagtgtgagccactgcgcctggccctctttgtcttttaaagataaagaccatgagactgttttaggttattgcttttacttataaatattcttggaagtattggcaatttagattttaaaaattaactgttcaatagctaagtaagcacacagctttcgtaatcgtttctgtagcatacttaccctaaaatgaatcaaattacaatttctctatatagtaggttattcttgcttgagtctcttctgtctgtctctctttttttttttttttttttaaagaaatgggtctcaccctgttgcccaggctggagtgcagtggttattcacagactcaaagtgcactgcatgcttcaactcttggcctcaagtatcctcccaccctcagcctcttgggtagctgggactacaggtgctcaccaccacacccagctcttccttaataaatgttttccttagcatggtatttttagttaataattcttagaattctttttaaagatttgcctccctaccaagacatgcattagtcgtctaaggttgcctgaaaaacatgtaaaaagcttgtaatattgaaaaatacatagtaattctagctggttgactatcagtttttcatttaagtttttagcatttggtcttgcttttagattctcatgtcctttattatagttaagagagaaaaatgctttgaaaattggtttctgcctgtgttgtatgtcagtacatataataagcataatggacatattcttctcagaattattaaatataagtgattttctaagacaaaaatactgtttagaaattatcttttatgtctttacatactttgtaactcatcctcagttatatagaaaaattgtgtcagaaaagaggacattcaaaagaaagaaaagcacaaatatggctatatgtgcattcccatgcagaagaaaatttgtagcatatgattgtttacattaaaaagtttctttgagaaaagtaaatgcatggaggcttaaaactatgaggaaaaaacccaaatcttaatgtttcaactagtatcaaaaatcatatttgatgtttataacaggatattagagtcacactcttgatttgatcttttcgctgagtcagtgtaatggcaccatgtatttgtttcattttccaaccctgctggtcctgagttgcctatattctctctaaattatgcttgcaagccagtaagctcttttctgtattcatctcttttagtactttatctagtatagctcttcaaaaccaatttacattttgacttgatctgttctttaagttcgttaggtacattttctgccttgcagattatttctggcaatgattccacaaagtgtttctccattatatagcataggtcatcatttcccagtctctcataagtagcttcctcatcatttctctagtgtcctagattactccccacctaccatctagtcccagagcagaagccacatgtttcaggtttttgttttggcagcacctcacttttggtactaatttctgtattggttattttactgtaatgaaaccatccccaaaacttagtggcttaaaaatagcagttatgtattctcattcgtgtaactggaggtcaacttgaggtggtggaggtggggagtggttagccagttgatgccatactttatgctttaaactacagattaggtagagatctattccgtattatttctcattctcctttggccagtgggccagtctggtcatattcttttatttatttatttatttatttatttatttagagatagggtcttgctctgttgtccaggccagagagcagtggtgcgattatagctcactgcagcttcatactcctgggctcaagcaattctcctgcctcagcctcttgagtgtctgggactatagatgtgtgccaccatggcttgctgttttttaaattttttgtagagacaggctcttgttatgttgccaagctggccttgaactctgtacctcaagtgatcctctcaactctgcctctccagtagctgggattacagttttgagctaccacacctggctttcagtttttccctttaaataagcaatagcaatggttcgttcctgagtggatagttctcaaagttattattaacagtctcgtatcttgattttgtggttattttagatatataccctttttactaaagcaaatgtctttagtcttcataattcttcaaccaataattattccaataagattaacttttttttttaaagatggagtctcactctgtctcccaggctggagtgcagtggcgtgatctcggctcactgcaacctccgcctcccgagttcaggcagttctcctgcctcagccttccgagtagctggaactataggcgcatgccaccacacccagctaatttttgtatttttcagtagagatggggtttcaccatacggcacggagtagtgtcgaactcctgacctcgtgatctgcctgcctcggcgtcccaaagtgctgggattacaggaatgagccactgcgcctggccaagattaacattttaatcagagttagaaacaagcttattttttttttcttctattataaactgttggttaaatgcaatgtggtatcttggattggatcctggaacacagaaagtacataagtagaaaatccaaataaagactggagtttggttaatagtagtgtatcattgttaattgcttgtttgacaaatgtagcatgattatctaagatgttcattaacattaggggaaattgggtgaagggtatatgggaactccctatgctgtctttgcaacttttctgtaaatttaaaattatttcttttttttttttttttttttttttttaagacggagtctcgctctgtcacccaggctggagtgcagtggcccgatctcagctcaatgcaagctccgcctcctgggttcacgccattctcctgcctcagcctcgcgagtagctgggactacaggcgcccgccacctcaaccggctagttttttgtatttttttagtagagacggggtttcaccgtgttagccaggatggtcttgatctcctgacctcgtgatccgcccgtctcggcctcccaaagtgctgagattacaggcttgagccaccgcgcccggccttaaaattatttcttaataaaactttattaaataaaaataaaaattactgacgtgaggaaatgtatagtaatgactgattaatatatagaatttataatttataaaaattaaactttaatataattcaagcagaacagaatggtattataaattaaaaaaccttaaggattcctgctcatgtatccaagtcccttccccagaagtaaccaggttggtttttttttttttttaaactttgttttacttctggtggttactgtcataattccagagatttttatactgtctctgggccttgatttatcaactttcaacaatgtcactgctctttctttctttctctctttctttttctttctttctttttctttccttccttccttcctttccttctttctttctttcttccttttctttcctttttcctttccttttccttttccttttccccttccctcttccctcttccctcttccctcttccctcttccctcttccctcttcctctttcctttccttcccttcccttccctacccttcccttcccttccctttccttcccttcccttccctttccttccctttccttccctttttccttccctttccttccctttttccttcccttcccatccctttccgtcccgtcccgtccctttccgtcccgtcccgtcccgtcccgtcccgtcccgtcccacagagtcttgctctgttgcccaggctgggaatgcagtggcacaatcttggctcacttcagtttctgcctcctgggttcaagcaattctcttgcctcagcctcctgagtagctgggactacaggtgcctgccaccacgcctggctaatttttgtgtatttagtagaggcagggtttcgccatgttggccaggctggtttcaaactcctgacctcaagttattctcccgcctcagcctcccaaagtgctgggattacaggaatgagccaccattcccagccattgtcactgctttcttaacaagaacagtaagtttttttgttgttgttggttttttttttttaagttaagtttttctgtcagttatattaatttttgttttatttttatttacttatttattttattttttttgagacagagtcttactctgtcgcccatgctggaatgcagtggtgcgatcttagctcactgcagcctccacatcctggattcaagtgcctcagcctcccaagtagctgggattacaggcacctgccaccgcgcttggctaattttttgtatttttagggagatggaggtttcaccattttggccttcctggtctcgaactcttggcctcaagtgatccacccaccttccaagtgctggaattatagatgtgagccactgtgcccatcctaaaaaaattgtatttctattaaaagcattttttagactagtcacatgcagtagtggaaaggggaaagagtagaacaagttctgtctgcactaactgaacagtcaattgaggtaactcactaccttcagactagcctctgtcagttacatttgtaacttgaataacatgcttaaatttgtatttcttgttctatcaagtttagacattttgtatcgactccatatgtataagatatagaaattcttagctctgtattgcttttcacctcttttcgaccatctattttcccacttctgttaactctagcattacttttactataattttaattcactatgttctgcttaaccagaagaaattcaagagggcttatacatatataaaacagattttgagttgattaatcatcatagtttaaaaaactggtttttaaagatgaattattaagataaatgtgtggagaaggaagaagaagagtttattcttcttagtgtacaatcttatcctcttatgggcaatttgacccttctaaattttatcttggtgtccttgggaacttttattttccaacctgtatactcagccatacctgaatttcgttaaggtgtactattttgcatatattcttggttctaggatgctttcaactgtaagacccattgttgctttaaagtaatgttattggttgggaggggattgcattaaatgattattagccccattgaaaattaataaagtgagaaacatatttgtatttagtttcttatatagaggggaaaataggcaaaaataaaaattgagtcaccattaattcttttgtccgcctttattttctttatccaaagaaaactttttttcttaaagaaaaaaaaaaaaagagctgggtacagtggcccatgcctgtagtctcagctgctttggaggctgaggttagaggatcccttgagcccaggagttacgagccagcctgggcaatgcagtgagaccctctctctttctctaaaaaagaaaaagaaaaaaattgaccctactattttggtagcctatccctttccaataaacctactcttctactttaacttattgttgtggctatataataattctatgtgtgaatgtacctaactcatttaactggttcctctatttgcagccttttctactataaacagtgttgtaaagaacttttcttatagctaagtctttgctcatatccatgatttttttccttctgatgaagtagaatttctgggcaaaatagagtatgaatttttgcatacttcctaataaagaaaaacaagttaacatttttggccactagccatcactaagatataactttttcttgttttttagtgaacacttgtcctgctccttcacc

SEQ ID NO: 1059 - DNA, 32306 bp, Macaca fascicularis
  source 1..32306: mol_type = genomic DNA
gtggccgccattaaagcgaagggaaaacccgtgaattcggattaaagggggaaaaacaccgcccgctgggcccacaaaatgggggagactacggcgtccagccggtgaggccgcaggagggcagacgttaggccggctcggcccagggacgacacgaagacagagccagagaatggtctgagcccgcagacgccgccaccacctccgccgctgaggagactctgggcttaaggacatcgccgctgccgggccgggggcctgggcttctctcccggttctcgcccttcccgcccctgtgtgggcgcctccccgcccgggagaaccttccagggcttgggctctgccgtctcggactcgtttttgattatttattgtgtaatttattatttttcttgtggtaggggcacacatcccctccgtctcccagagaaggacgagcgtctgcgggctccgcagtccggcccgccaggcgagcgcggcgcggccctcccgcctccggccctcggccccgggcggctgggtgccggccgggcggcgggggctgctcgcggcggcggcagcggcggcggcgggggggtgggtggggagggcgggcggcccggcggcctcctcttccaccgcccccccaaccactaccccccccacgccctccccggtgtctgtgtttctctctctggtcggaggcggcggtaatggcggatggtgggttgtggcgccggcggcggctgctgtgagggacgatgagtgcctccttcgtgccgaacggggccagcctggaagattgtcactgtaacctcttctgcctggtgagtgccggggccggcgggcgccgagggaggggggccgtgaggtgcgcccttgggccgtgggggagggggccgggtctggtccagatgcccgagtccccgggcgaggcccagccggagccggcgccctgcgaagctccgcggccaaccccgggagactgcgttcgctctcccacggtcccgggccctgtttggggagtgttggcattttttctcgtcttctttcggactctcctcttcaccgtagtctcgtcctcaacttgagctccttatctggcaggacagtaacctttctctctctcttaactgttgcttttctgcttattggccttgtatcccagcttcacactttccattattgcccctgctccccaccgcctttatgtctcatccttttaatttggtttccccatgtaaacaggaccccagaacttatgccccagaaacctgtcttcgttttacattttttttgtatgagtcaaactaacgcaaggttagtttcttccttgggtgacttaagatctctctgtaaaaaccagtaggtgccatttcatatgttttctttttaaactttgaaaacagtttgccatttttgacaatttctagccatcttgcttttattagaacataattttttttgtgcgagtgaagggggctaatggacgaggtgctgtggttttgcactgtttctatatttattgtgttttgcttgctttttcagaatgttttgagcaggctgctcccttgtttgattgaaatgaaaagtccagagaagctgggtgtagggatgaccattgtgtaggttagcccaggtctggtaacatccaacagttgagactttcaaaagtaccaactgttgcaaataacttggcctgtgtgggacagttgctgagcttcatcaatgactttaagtttgggtgactttattttttcattttctcctttgtgctatgagaaatattaagagtatatgataggtaataagtgagttaagtgggcggagcacaactagttggcaagtgtaaactgccagtcatgtatcagcagtttcatttttggcaccttatgctttgcacctttaagttagattaaattattgaattcctcttgaatttctttctggatgctaaattgagatctttcatactctatcctcttctacagtatgtttttcttttcaatgtccattaatcagcatctcttcacgtataataagacatacaccaggttttgtattctatcttatccaactcagtctatttttgatacttttaggatcaggctctttgaagatagactagcacaaatctgacagttctttgtgagcagctatttgacttttccgacaggggtatgtgtgaagaattaacatagatttttttcaggacttgttcagatgtcttttcattagagacattacttctgtaaatgtggaataaaaacccgtgatagggtctttaataattgattttcagttaaacgtttgacaccaatgaataaatgtgaccatttaggacagagaaaaatgtactctgtttgtatattgaagtgtgtgtgtctgtctatatttaacttcgttcagtttcttttatttctacttggagtacatatttgcttgctattcagtgacatggtggtatttatttttaactgtgttcttctccctaaaattgttggttgttgaattataaagtcattttttttttggttctaatttgcattcaatagctcaagcatatattgaaaaattgtaatgtcttaacgaaataggagacatcgtatggagtacttttgtgaatttgagtgaatatgcaataataaaacatcatgctttcttttcttcaggctgacttgacgggaattaaatggaaaaaatatgtatggcaaggcccaacttctgcccctattctgtttcctgtgacagaagaagaccccattttgagcagttttagtcgctgccttaaggcagatgtacttggtgtttggcggcgagatcaaagacctggaagaagagaattgtggatattttggtggggtgaagaccccaattttgctgaccttattcaccatgacttatcaggtgaaagaaactttccatttctaattaatgatacagcaacattgtatacttctcccagaatatcatttgtattacaaagtaagtttgttattgtgggacacttaggtaggaggccagataaaaattgagcttcatgttttatttcaccatgattattttattttactcaaattatccatgttatagctgggttttttaggcttgaatggctttctccttttaccacctctcttcttaatttctcacgggtagttagggtccaaggaaggcatgccacattaatctcaaaaaatggaatcaggaaacagagttcctaacaaagtcatgtaatagttttgaagccagatgtaacttttgagtcacttcagccactgtcaaagttgagtcttttgcattaaatgggcagatgattctaaaagtactggaaatgtaactatccttgtgtttgtgtgtgtgtgtgcgcgcatgttttaaggtatgtaagtattttgttactgtcatttgtgctgtttgattaacatatgaaggcatatgttaatttagttatttttggaaagtgactcatatactgttctgtcacatactcaataagagacaagtgccaacttgtttagcttttataggacatgggatcataatctaaaaggttacacaaacaattttattatgagcaaatcaatgtgattacttccttattttcttgacttttaggaccaaatgctactttagaaagagaaactatagcttttcataataattactgaagctttgaactgtcaaagtcagtatttactgaatcttagataataggaatgtaaatgattggttgtatgctataaggttccgaacacttcggtaagatagtttgataatgatttttgatagataaatttaggatttctagataatttttttaaagttcttgtttgaaattgagtactctgaagtttttgttattgtccctatgacctataggatctattttatttctggatagaatgtattctaggtgtctgtatcttgaactggtacttagtaagaccaacatttatgtaggaatgtacgtgttacatttgtatgttttgataattgcttttcacattctaatgaacatactctcccgtgataattactatttttgagagtgattgcatttcttcaagaaagctttccagcttttgtagtttttctaatgagatgcctgctgcagagtctagtccctagttctttgtatttaatgtagttctaaatgtgtaaaatgatgtgtgtatgtatatacatatacgtatacatgatgtatgtatatatagtagttttagcaagataatgccttctaatcatgctgaaagctccattttcttttattgacttggatatagtattgagttattttaatcattaagtggtcataaaaatcaccttactagaatgtttggaaactatctaacattgttgaaaaactataaactattgataaaatatatttgttgataaaacataattatcaataaaactataatgctgacttaggggctttggtcttaataaagttggcagagcatctaaacagacttaacagatctttcttaaagattccatgaaatacactttgtagaatcaaagataattttaagagatatataatgaggccgggcgcggtggctcaagcctgtaatcccagcactttgggaggccgagacgggcggatcacaaggtcaggagatcgagaccagcctggctaaatacggtgaaaccccgtctctactaaaaaatacaaaaaagtagccgggtgaggtggcgggcgcctgtagtcccagctactcgggaggctgaggcaggagaatggcatagacccgggaggcggagcttgcagtgagctgagatgcggccactgtactccagcctgggcgacagagcgagactccgtctcaaaaaaaaagaaaaaaaaaaaaaaagagagatatataatgtttaatttttttttcttttttctttttaagtagagatggggtcttgctatgttgaccaggctggtcttgaactcatgaactgaagtgatccttccatcttaacttcccaaagtgctgggattacaagtgtgagcccctgcacctggcctagttttaccataatagaaataatattgtgaaagttaaaagactattaaagttagatgtgagctgctttgatgtatattgttaaaagtcagttttttcttctaggtttcatgttaccagtcagatatgttttctccactgaaactaggttacagtcttaaacgtttttctctagtttagctttgatttttagcataattttcaaaaatcatagttacttgtacctttaaaatagagagtgatcagctgggcgcggtggctcacgcctgtagtcccagcactttgggaggctgaggcaggcagatcgcagggtcaggagatggagaccatcctgaccaacatggtgaaaccctgcctctactaaaaatacaaaaattagctgggcatggtggcacgtgcctgtagtcccagctacttgggaggccgaggcaggagatacacttgatcccggcaggcggaggttgcagtgagctgagatcttgccactgcactccagcctgagcaacacagtaagactctgtctcaaaaaaaaaaaaaaaagatagtgatcctgaacgtgaatgaaagtaattttggggggaggttgggtgtttttttttttttttttttttggaaacagagtctctgtcgccaaggttggagtgcagtggcgcgatcttggctcactgtaggctacgcctcctgggttcacgccattctcctgcctcagcctcctgagtatctgggactacaggcgcccgccaccacgcccggctaattttttgtatttttagtagagacggggtttcaccgtgttccccagactggtctcaaactcctgagcgcagtctgtccacccgcctcggcctcccaaagtgctaggattacaggcgtgagccaccacgccaggcgtaaataacttttaaaaatttattaaagtgaagtgattgaaatagtaaactgaaatacaattaggagtggtatgtgatcgtatttattgttccaaagcttgtcctgtactgttttagtttgcatagtcagtggtatttatatgttttagcttttttttttttaataaaacctgttattaagaatgttgttacttaaatcagacgtatcttaaagaataataagatcttttcagatggaatatatttgttttgcccttttctttgctctggggacagcgtctgcctccctcttggggtaattagtctgcctgtgtctctctagctaacccctttttcatttcttcccatctgtggcactctatttccttcttttaagctcccctgagaagagagcagctggacagtacagggtagcatcagctgctggaggcagtcctgggttccaagtggaggtgtagcactgaggaaaggggtaccggaaggacccaggtggtaactaaaaagctggttaatttagcttgagcctgctcttcacagacagtgtccttctgtttgggtcagcacacaccacatcttgttactgaagtgtttttgattatggtgataatattgccctcgtttttcttggtagtgggggaagagggaaatatttttccaaagattagaattctgtttttcttaactggaatattcaataacagaaatacagaattgcctttgtttaacctccttagctcctttgtgtcatgcagtgtattttaaaaaattaactaatgaaccaatattgatactttattattaactaaagtatatatttggatttcttttattgttttttgcctaatatcctttttctttcctaggatctcatctaagatacccatattatatttaattgtcatgtctctttaggctttgctagactatgacagtttcttagactttccttggttttgatgatttcgacagttatgaagagtctgctcagattccatagtgcattttaaatttcagtctctctcatgtcacttagcatttgtttgggttaccttcctttcaagtttagctgatgtgtagaaatagaatgtaaacttatattgctaactggtagagatccattacagcaaatcaaatctgatttaatacatactttaaaccctcagttactcattttgtagcagtaagtcaatactgttgagcaaagtaatttgcagaagccaggtgatttttggatcaggacttgtgctaactagtattagcctaactataatatttggaaagatacttgttcagaaaaaaactcttgaattccaaagccaaacatagatgattttcttactttttgttttatcctctataggataatgattagttgaatcggtgtggatatgttttgatacaaaaagattagagaataaaactcctttggggttaacagcttttttctttctttcttttttttttttttttgagatgaagtcttgctctgtcgcccaggctggagtatagtggggcaatcttggctcactgcaacctctgccttccaggttcaagcgattcttttgcttcatcctcctgagttgctgggactacaggcatgtgcctccatacccggctaatttttgtatttttagtagagattttagtgggcgttttgccatgttggccaggctggtctggaactcctggcctcaggtgatctgcctgcgtcagcctccgaaagtgctgggatcacaggcgtgagccaccatgcccagtcccttttttaaaaaaaattaaattttgtagtttgtttatggttgtgtgatagtgggtgaaagaggtatgaaatgggtaatgggaaaatcttagctcgggccctctggtcaaaaatctctatagtgggtaggactggtacttttaagtgtactgttaatttgcttcagagcaaggttgtttcattttcattaatgtgttcttgaaggagagttttctccgtatttttattctgtgttctaacgtttttggaattcaattgctgtcatcattgacttttattctttccctttaaataaaaataaaagcaaaaactgcgtcctctcccgtttgtcatcttaaaaaaatcatagcaagttagactgtgatgagagtctttgagaaaactgataccttgtgaactaaaaaaaactcagggctaaaaatatttcttctttttcctggctcctgaggtctgtaaagtagattttagtaacatgttcagatagttttattataccagaattttgtcacaatgaatagtgctcaaactaagtggactattgttctgtatttaattttggatgtttttattgaaggatattaactatagtggactttaaccttaaatgacagatgttaatcggattgacagatagataaacagccaggcataggaatctagtcccagccaaactaaaacattgttttgtgccccaggtaatctaaagagagtaattcatttctactgttgtaaaattaacttgtgatgtggtctgactcttcaaattggctagtcttctaggtgacaacttcatttgctgcatactgttctttttgatcaagtgtattttctaagttttcaagtcaaacataacatactacgctgttcttaaatcagtttttcaagttttgccatagataatgatgcagccaacttaaggctctcagtatatttgttgaatgtgttggttattaatgattattcattagaaacactgatctagcatttaaacatttctctttatttcaggaactacatggaattttctaccatgttaatttttgagccattcattagcatatgttacattttaatagtttagcaaaattatacaggagaagattcgttttttaccactgtggatatatttaaagatgccagttttgagaaaaatgttgagtgcacggtgtatttgcttttttggttgtgatttttttttcccctttttttttttttttttttttgtgatggagtctggctctgtcgcccaggctggagggcagtggccggatctcagctcactgcaagctccgcctctcgggtttacgctgcctcagcctcccgagtagctgggactacaggcgcctaccacgtcgcccggctagtttttgtatttttttttttagtagagacagggtttcaatgtgttagccaggatggtctcgatctcctgacctcgtgatctgcccatctcggcctcccaaagtgctgggattacagacttgagccaccgcgcccggcctttttttccctattgatagataattattttgatgacttatcacatgctttggcactactgtattctgtatcttcaggaagaaaatatggtaatcaaatttagcatttgtattttcttccaataaatcatccatgaaaatttcaagaaacactgatgattaagaattgtaatgctaatagtaatagaaaagtactaagaatgcagagttgaaaactttgttttctctacaagaggaggaatttttttttttttgtagagatggaggtctcactttgtcactcagcctgcagtgcttaatcatagctcattgcagcctccaactcctggactcaagcaatcctcccacctcagcttccccagcagctgggcctgcaggcaggtgctactatgccccactaactaaaaaaaagttttttggagtcagggtcttcctgtgttgccaggctagtcttgaactcctagcttcaagtgatccttctgtcttagcttcccaagtagttggaattacaggcatgagtcattgtacctggctagaggaggaaaatatttaaatggattaagcagactttttctgttaggctctggttaagttcagaagagctaggtgttcccttctccttcccctccctattataatgctggtgttgagattcaataacttgtttcaattagtgtaaatagtgcatatcgctatgccttgggtgggttggttgtaccatttcacttttcatatctgaatacaacatgtagagagtacttttattaaggttattagattgtcaggatattagaagcttggctccgtaggcttcttgtttctgagtgattcccaagaaaaccaaaaaccttcagactttttattgagcattattaggacttattctcatttttctcagcaacaaaatatgaaattatattactttagtgtaatggttgcttagttgcttgccatatagatgaagatatacttcagagatatgttgggtttagaaaacctcaacaggtggtctctacttgtttgttttatgcatagctcccatttagtgttaatgagaattttgggcattggggacataagatgcccacgccctttgaaagcattagaataatgagggagagatgcttgaagattaatactgactacttttctaaaccacattcaatattccttttttttttttttttttgagatggagtcttgctctgtcaccaggctggaatgcagtggcaggatcttggttcactgcaacctctgccacccagttcaagtgattctcctgcctcagcctcccggatagctgggactatgggtgcatgccacctcgcccagctaagttttgtatttttagtagagatggggtttcggtatgttggccatgctggtcttgaactcctgacctcagatgatccgcctgcctcggcctcgcaaagtgctgggattataggcatgagccactgcgcatggcctcacattaaatattcttaattcatttaactgcaggtttcattgaaatagattttacaaaataaaaccatacaattttcagaattttatgtgaaaatttataaattattgtgttttagcttttactattgcaaagtttttttttgttttttttttttttttttgagtcagagtctcgctatgttgcccctacaatggagtgcagtggcgtgatctcagctcactgcaacttccacctttcgggctcaagtgattctcatgcctcagccccttgagtagctgggactacagctgtgctatgcacggctaatttttatgtttttagtagagatggagttttgccctgttggccaggctggtctcgaactccgggcctcaagtggtccacttgcctcggcctcctaaagtgctgggattacaggcatgagccaccacacctggcctaagcctccctgacagcaggcgtgagccaccatacttgtcctcagcctcccggaaagcagatttttttatttactgtttttgggaagaaggcaaagtcattctctagttttaaatgaataatttattcgaagtttataacaactgtacaacttttgatacttataaatggtaactgtgtcttgggtctttgatgctttaaaacttagatagaaaaaagatgttggtagtggcttcttctgtagaacaagtgttataaccatcagaaggtagtgatttttgaaataaaaggtaataaaaataaaagatactaaattgattataaagaggtgaagaattgggagatattcctaacataattctgttggaattaagaacatgtatattctagtagtcataagtctcataatttgaggtaaaagtcttaatgtagctgtttaattttgaaatggtaggacctcattaaattgaaagcagatcaattgagaaagattattttctcttttttttgttatcaactcacaaatatgcttgtgagctagacgtttaattaattaaagtgaagtcactgtgtgccacttctctattctcctagtctaatattttctttaataaagtgatacctttgggcaggcgccgtggctcaagactgtaatcctagcactttgggaggccgagggggcggatcacgaggtcaggagatcgagaccatcctggctaacacggtgaaaccccgtctctactaaaaaatacaaaaaactagccgggcgaggtggtgggcgcctgtagtcccagctactcgggaggctgaggcaggagaatggcataaacccgagaggcggagcttgcagtgagctgagatccggccactgcactccagcctgggcgacagaacaagactccgtctcagaaataaataagtgaaacccataaatgctttggttttaaatgacagtagataatggtgtctttgatataatagaatgtcaatttttcatatttaatatttatgattaatattagacttaaagaattcttctattcgaattctgatatattgtcattttctaaagcttattccactttttttcccctaagcttaccttttttgtttttgagactgaatctcactctgtcccaggctggagtgcagtggcacgatcttggctcactgtaacctctccctctcgggtgattctcccacctcagcctcccaggtagctgggattacagggctgccctatgacgcctgggtaatttttgtatttttagtagagagggggtttcaccatgttggcaaggctggtcttgaactcctgacctcaggtgatccacccacctcagcctcccaaagtgctgggattacaggtatgagcaactgcgcccagcctaaagctaatttaaaatgaaataaaataaaataaaataaaattagttgctttgaaagacttgactatcatttaggaaaaaaacataaaatcaactttaatctttgcagtagcacagaatttctagtgcagttaaagtctactgtcatgctttttaattactgtttgttctacccatttgttgtataagttgtgcctataaaccatgtgtaattcttaatacatgtctttgcttttattcgaaagctcatattgtgtctatttttctgtgggtatagcgtatgcatgtttggtgttgaattgagaaaggtttgtcttttatttttacttttacttaaacattgaacacagataacccatatttataaaatgtttataaaggtatacagtctatagaaagagagttaattatatttagactaagcaatttaaaatcttgtaatgaaagttaaaatgctgaagcagtatcattatttgtggcacgatttattgaatgctttgtgacagatatgaaatggatagagtatgaaaaacattttttctgacctacatccagacttatctcaaaacgactgtgttaatgtttttttggtaaattaacttgaagtgattaatagatttgctggcaaaattgaagctgtatagttagtgaagatagctataattttatatgacagaagtgccatttacaatttaagtctttaaatttttaaatttctcccccaagtaaaggatcctatactgaataataatcgtgggaataatttggttgaaatgagacctaaggtggctgatagtgcactgcttgttaggctctgtgccaacagcttcctttttattcatcacttagtgttacagtggagtcatggattagaatgctgatggacatgaaatgttttgatttcaattattaactggctaatttttttggcaggttgagtgattgggggaattaggacaaagtaacaagtgagccagcttagaaattggcatcataggtatagagtgcgtttaatattttccaggttttgcaaacaagcgtccttttcattaatacaggaaccaattcagtatgttcatgatgtcattgaattttataaggtggaaaaatacttttcaggtaatttaatagaatatatggcacttagaccttttattctttatggaataactttgaaacctcctaatgtctagagatacattgaagtgattgtagcttaatattctgggataagctagtgttgatgagtataaactgtaaccttttttacttggctctgaatagattatagtgctactattttacttactgtttccttcgtttctcttttagaagaagaagatggagtgtgggagaatggactttcctatgaatgccgtactctgcttttcaaagcagttcacaatctattggaacggtgtttaatgaacaggaattttgtacgtattggcaagtggtttgtaaagccttatgaaaaagatgaaaaacctataaataaaaggtaagctatcttaaattctgatgtgatatttctttagatttgttcctttttgtatctttacagagaatgtgggataaaacaagctaatatcatacaggcatattcaggaggttatcagtgacaaaatactagatatagtcaggttttttgtttttttttttttaaccactttacacacttccctttacactctttaagaattttcttacagtaggaataagctgtattttaatacagtggcctaaattttgatttgggatgatagacaaaatatgggatgaaagcagatccttaggcatggaagtgtatgcccagcactctgatattaaagttaagtaacattaacacctgttaaagatagtgatctgtgagtatgttttggattaagttaacccttcttattcccagtctctcaattccctttaattaaagtaatttaaatttgtgttttctgtataagaccatttactctttgagagcttataattttcttgagcaatgaattaagcaatttatgacactaattattagagtagttgcagatagaggcacagaagacttatgatagatacctccttctcctgtgcaattaaaaccttcaggttactacgcttctctgtgatttagataatataaggcatagtctgtcagaagatttaagttcccagcagtcattgagttagtgagacttcaagagagatgaaccagtggcaagtaagatgggatgtggggaagagaaaattaaagggaacttactaatttttcctgaaaggtgtaagaggatgtgaagtgaacatttggttgagattgtaatcattttgaggtctttcatgtcatatatgcgcatcttttttcatgtgcacctggaggtttttttttttttcttcttgaaactttttagttttagtagactggatgagtacataagcctggataaataaaggtgctttcattttttttcctctttgaaaattaacataaatctttattgttaacaaaatacttgtataagtttggaatgcattcagctgaaaatggcagaaaaacattaactacttggcttatgtagggattgatttttctcagtagcaaggagtatggaggtagatagtttagtactggtatatctgttcaataatgtcatcaaggattcaaggttccccagagttttctgctgtgccatctttacatcttcatggtcctcccgtgtgttgcacctccagacctcacggtgaattccaggcaggaagagaaaggaagggaggaagtaagaaagtgtggcacctgagtcagaaagtaaattattttctggaaactctagctgacgtatctttggccatactaagagaaacagatatcttttatttggaaacagctgctctgaacaaaatgaagtttttgttagtaagaagaaaggggtgatagatagataccaaagatcaaagaagtggaaatggatattgggtaggcagttagcaatatctgccatatacatttatttatttatttattttgagacagagtctcacactgttgcccaggctggagtgcagtggtgcaatctcagcccactgcaacctccgcttcctgggttcaagtgattctcctgctcagcctcccgagtaattgggattacaggcgtgtgccactacacccagctaatttttgtatttttagtagagacggggtttcaccatgttagccaggctggtctcaaactcctgacctcgtgatctgcctgcctcggcctcccaaagtgctgggattacaggcatgagccactgcgcctttttttttttttaaagagagactcagtctgttgcccaggtgggagtgcaatggtgtgatcttggctcactgtctcagctcactgcagcctccgcctcctgggttcaagtgattctcccgcctcagccttctgagtagctgggattacaggcatctgccatcacacccagctaatttttgtgtttttggtagagacacggtttcgccatgttggccaggctggtcttgaactcctgacctcagatgatccacccacctcggcctcccaaagtgctgggattacaggcgtgagccactgcgcctggcctatttatgtatttattaagttctgggatacatgtgcagaacgtacaggtttgttaattaggtatacatgtgccatggtggtttactgtacctgtcagcccatcatctggattttaagcccagtatgcattaggtatttgtcctgatgctctccctccccttgctccctatcccctgacaggccctggtctgtgatgttcccctccctgtatccatgtattctcattgttcaactcccacttatgagtgagaacatgtgtttggttttctgttgttgtgttagtttgctgaggatgatggtttccagcttcatccatgtccctgtaaaggacataaactcattcttttttttttttgagacaaagtcttgctctgtcgcccagggtggagtgcagtggcacgatttcagctcactgcaacctccgcctcctgggttcaagcaattctcctgcctcagcctcccgagtagctgggattataggcacccgccaccacgcccggctaatgtttgtatttttagtagagattggatttcaccatgttagccagaccggtctcaaagtcctgacctcaggtaatccgcccacctcggcctcccaaagtcctggattacaggcatgagccaccatgcccagccgaactcattcttttttgtggctgcagacccccgtctctttaaaaaaaaaaaaaaaaaaaaacggtgggcacagtggcacacacctgtagtcccagccactctgaagactgaggtgagaggattgcttgagcccagaagattgaggctgcagtgagttaggattgtgctgttgtactccagcctgggcaacagagcaagaccctgtcttaaaaaaaaaaaaattataactttttctttttgagataaggtctcttactttgtcacccaggttggagtgcaatggcacagtcatggctcattgcagcccaacctcccaggctcaagtaatccgcacacctcagcctcacacgtagctgggaccacaggtacacgctaccacggctggttaatttttgtagattttgtagagacaagatatcactatgttgcctaggctggtcttgaactcctgagctcaagctacccaccttcttcggcctcgcaaagtgctaggattataggcatgggccaatgcacctggctggaaatacacctttttttttttttttttttttttttttttttttttgagacagagtctcactctgtcgcccaagctggaatgcagtggcgtgatctcggctcactgcaagctcagcctcccgggttcacgccattctcctgcctcagcctcctgagtagctgggactacaggcgtcagctaccacgcctggctaattttagtatttttagtagagacagggtttcactgtgttagccagaatggtctccatctcctgacctcatgatctgcccgccttggcctcccaaagtgctggcttaacaggcttgagccaccgtgcctggcccgaaaataaaacttttaactggagattttcatgaatccaacagattctgcttgttatttaaccatgtaattgagcactagtgtttttccatgggctgacccatttaggaggggaactaaattaagattgtattttattagtgaagtgttaccagaaatagtgtatgctctttcgagttactcttgaaccatagttgtggtataaaaactgattttattcggaaagataaatgctggtcctcaaatctcttttttgcaggacctttcttaccctttttccttctatgtaatagcaagtaggagaaaaaccaagcaactaagtctgtctttgagttatgatatgggacttcttttctgttgaattcagtggaatgatatagggaaggtagataaagattgattataaattaatacgtctctagaccattctgaaacataagtatcatatagactgtttttgtttactaatcaattcacttttggtataagtattctgaaaaaagaacaagagttgtaaagaaagaaaatttatgctgtgaaactagtttgacctgaacaaaggagaaaataatattccttacatttttatcttcttcctttctttattattttttttgttttgttttgttttttttgagacggagtctcactttgtcacccaggctggagtgcagtggcaccatttcggctcactgcaagctccgcctcctgggttcacgccattctcctgccttagcctcctgagtagctgggactacaggcacgcaccaccacgcccagctaattttttgtatttttagtagaaacggggtttcaccgtgttagccaggatggtctcgatctcctgacctcgtgatccgcccgcctcggcctcccaaggtgctgggattacaggagtgagccaccgcgcccggctatcttcttcctttctttaaaatttttacataaaaattctcattttctgataatctggacctacatgtagttgtctgtttaactttaacagtctttagggactgaaagagaggaaatggaatcaaattctagggatacagctaggttacctttaaagaatcccacaagtataagagtaaccacaggaacaaaccagtcttcagttaattggttaaaagaatgatgaccagtgttttcttgaatagtttaggtgttttcctgtattgctggggactggatcacatggcagacattgagttttctagtgagcccacaagtaaatgggttgtattaagtaccgttgacttcatgtaggttttagagtcttctataaaaggtattctgaacttgtgatgtttgagagtgcatttgaataagattatcttgaataagaactttcttttttttttccatttttttaaaatagagacagggtcttgctttgtgcccaagatagattgcagtagcacaatcataactcattgcagccacaaacttccaggcctaattggttctcccacctcagcctccagagtagctgggattacaggcgcacaccacctacgcctggccaaggactttcttaagattatgtttggttaagctttttgtcatgttgaatctgttgtagccatttagctgagtgtgcagtaaagtttatttagcaaaaatatgttgttaaatcttttttgatgtatttatgtaaaatagttacctttaactccaattttaaaaggcaatatagggtagacgtggtggctcacgcctgtaatcccagcactttgggaggccgaggcaggcagctcgtgaggtcaggagttagagaccagcctgatcaatatggtgaaaccctgtctctactaaaaatacaaaaatgagccaggtgtggtggcacatgcctgtaatctcagctacttgagaggctgaggcaggagaatcacttgaacccgggaggtggaggttgtagtgagcagagatcgcgccactgcactccagcctgggcgacaagagtgaaactccgtctcaaaaaaaaaaaggcaatatagagtattacatgttatatatgtgtgtttgtctgtattacattatgtgtatacatatcgacatacaataggatataataaactcttgctggatataacataaaataggattaaatgtttggttcaatatgttctaagcctttgtattagaataattagagccctggaattaattagtagtaaagaactttgtccacagagagtgataaatttttggttttgtgggataaagcagtaaaagttcacaggaaggaaaggatggctattgttaatggttattgggcaatgtagatctagaacattttcatcattgcagaaagttatttttttcgggtggtactgcttacacaagaacctttatatttataattaaaatggtactttcggtacttcaataaagaaaatcatcaaatttttttaaggaagtaaatgaaagaatatgctttaaatttcaaccataaagctatgtttattttctgccatatgtatagcttttacattatctcatgatctccaaaactgattaaaaataggcaccatgagatgtaagtccccactggaaatgttttattaactgttagtagcattaggatgtcctttggttgggtttctcactgtctctgaaaaggcaaatttctagagaagctaggagctattgctattaggtttttttatggactcatttcctttcttcctgtcatctaatgtagtactgtccagtagaagtataatgtgagccacataggtaatttaaaattttcttctaggcacatttaaaaagttaaaaaaacctaaatgtataggcaaaattaattgtaatatatttttaaatgtagtatgtccaaaataatatcatttcagcatataattaaatatacagaagatattaatgaaatagtttactttttgtactgtctttgaaattaggtttgtgtactatgcttagagtatatctcagtttggattttaagtcaccagtagttatatgtgtgtattggctgttgtatttacaacacagttctagggctttaagcccagttgaacttggtagtgtttgttggtgaaacaacagtgttctctgttggtcagtgaacccttctggaattgtatgctaaattgtgagtatgctctagaatctcaaaggcaagaagaatctcataccttgcatcagtcagggtaccaactctctgctaaattaggtgtagttacttcagcagactggatgtgcctttttattgttttccctgtagcctacctatgatgttttgtccttaatgtctgtcatcaatattattatgtatcatttctgaagtcttaagtgacgatgtcactagaatttgcgtggtcagttttctacattttcatgccttctagaacatttatgagaaaaattaaatgttaagaaagacttttctttctcctatttttcctccttgttgagattttcttaccataatttttttttttttttttttttttttttttgagacggagtctcgctctgtcgcccagactggagtgcagtggtgcgatctcggctcactgcaagctccgcctcccgggttcacgccattctcctgcctcagcctccggagtagctgggactacaggcgcccgccaccacgcccggctaatttctttttgtatttttagtagagacagggtttcaccgtgttagccaggatggtctcgatctcctgacctcgtgatccgcccgcctcggcctcccaaagtgctgggattacaggcttgagccaccgcgcccggcgtttcttaccataatttttctttctttctttcttttttttttttttttttggagacagggtcttgctttgtctcctaggccagagtgcagtggtgcagtcttgactcactgcaccctctgctcccaggcacaaacaattctcttgcctcagcctcccacatagttggtactttcaggagtgcgccactacacctgactaagttttgtaatttgggtagagatggggtttctctgttggccatgttgaccaggctggtctctaactcctggcttcaagtgatcttccagcctcagcctcccaaagtgctgggatgacaggtgtgagccaccatgcccagcctttcttaccataatttctttctatgattcttactgtagactcttacaaatctgtccaagctcatacagttatcaagtattggagctgcattttaggcatgaaaaatatgagatagattattgaccctgtagacctgtatatctcctacacatatttttttttaagttataggaagtagtaaaaacatagtacttagaaacaacaataaaaagcagcattttgcagaacatttgaagtggtaaaccagaataatgttttagctttctaagttttttttttttttttgagatggagtctcgctctttcaccagactggagtgcagtggcgcagtctcagctctctgcaacctctgcctcccaggttcaagtgattctcctgcctcagcctcccaagtagctgggactacaggcgcgtgccaccacgcccagctaatttttatatttttagtagagttggggtttcaccatgttagccaggatggtctcgatctcttgacgttgtgatccgcccgcctcggcttcccaaagtgctggaattacaggcctgagctaccgcgcccggccgctttctaagtattatttaccgtataatgtaagtaatatgttcactgagcgagcagaaatatgtacaggatttacaggtaagatgttaacttctggagtttagtgtggatcttttgttcatggagctatgttaataatacctgatactggccgggcgcggtggctcacgcctgtaatcccagcactttgggagaaatcacgaggcgggtggatcacgaggtcaggagatcgagaccatcctggctaacacggtgaaactccatctctactaaaaatacaaaaaattagccgggcgtggtggcgggcgcctgtagtctcagctactcgggagactgaggcaggagaatggcgtgaacctgggaggtggagcttgcagtgagctgagatctggccactgcactccagtctgggagacacagcgagactccatctcaaaaaaaaaaaaaaaaaaaaactgatactggtattatacctttaaatttaagaatttaaaacagttactctgaaggctatagaaatacaaattaatgattcccaaacttgtctggatgtgggaatcacctggagagcttacaaaaaattattgatgcttgtgtcttaacctggggctgtaatctgggctttggaatttttagaggatcctaaaaatgtaagacaagtttagaaacttgaattcacggaataaaaataatctcagaattaagatggctaggggaggctgggcacagtggctcatgcttgtaatctctgcactttgagaggccaagacaggaggattgctttagctcaagagttcaagaccagcctggacaacatagtgagacctcatctctacaaaatataaattaaaaaaattatctgggcatagtggctcacacctgtagtcccacttacttggttggctgaggcaggaagattgcttgagctcaggaggtggaagctgcagtgaattctgatcacgccactgcactccagcctgagtgacagagcaaggccctgtctcaaaggaaaaaaaaagatgaatatagtttttttattgtggtaaaatgtacataacataaaacttaataatttttcggtgtacagttcagtggcattaagtacgttcacgttgttaaccatcaccactatctgcagaactttttcatcatccgaaactgaaagtctactcataaaagagtggtagctcttcaattcttcttttcttcagctttgtgtaaccaccattctactttgtctagaaacttgactcttgtaggtacctcatatgagtggaatcatgtagtatttgtccttttttgtctgggttatttcagttagcataaaatcttcaagattcatttatgaaacgtgacagaatttcccttatttttaaggctgaataatattccattgtatgtatatatgacattttgtttatgtattaatctgtaaatggtatttgggttgttttcaccttttggttattgtgaataatgctgctataaacattggtctgcacatctctcatcaagtccctgctttaagttcctttgggtgtatacccagaagtggaattgctggatcatatggtaattcgaagtataatttttggaggaatttccatactgctttccatagtggctgcactattttacattcccaaaggcattgcagaggtgttccattttttccacatcctcatcaacacttgttatttcctgttttttttttaaagctatttttatgggtgtgaggtggtatcttactgtgttttcggtttgcatttctctaatgattagtgatgtgttgagcatgttatgtgtttatcggccatttgtatgttgtttttggagaaatgacggttgaagtcttttgcccatttttttaattggttgatagggtgtttagagtttgaagtcagcattccctttactagtattatgattttaacacaagccatttaacctctttgtacctcagattctctactcacaaatgggatatcatttttctgtagcttcttaatacaaatgctagaaataggtttgatgtggcactgcctaatctagcatacgtatggaattgttgctgttagagcagctatctttaatctataagcatgtcttttctgttttagaaataatcttttgattaatttcagtacttaatttgaggaacatttttttccacaatggaagattattcaagtttcatttataaaattctgcctcattcataactttttgttttagatattgcagtgtaagctcatggagagcaagtgttttctgcagtcctttatagtagctaataatactttggattcttattgtagtgatatgtttttgttttaactctacttttctgagtgttaaataccaaaaatgtttgatgggatgatatgaataacatttctccttggaaaaaaagcacaaccgaattcactgtgttggtattttctaattgttttataatattctctgactagaatgttacctttaatataaggatttcagagatttgggtgtggtggtgtacacctgtagttccagctacttaagaggctgcggcaggaggatcacttgaggtcgggagtttgaggctgtagtgcctcacgactgtgccagtgaaaagccactgcactcctgcctgggtaacatagggagaccgccgtctgtttaaaaaatttcaggtcggcacagtggctcatgcctgtaatctcagcactttggggtgccaaggtgggcgaatcacctgaggtcaggatttcaagaccagtctggccaatacatggtgaaaccccatctctagttaaaaaataaaatacaaaaaaactagccggacgcagtggcaggtgcctgtcatcccagctacttgggaagctgaggcaggagaattgcttgaacccaggaggcggaggttgcagtgagccaagatcatgccgttgcactccagccttggtgacaagagtgaaacggtctcaaaaaaaaaaaaaaaaatctctgctgggtgcagtggctcatgcctgtaattgtagcactttgggaggctgaggtgggcagatcacttgagggtcaggagtttgagaccagtctggccaacatggtaaaaccctgtctctactaaaaatacaaaaattagctgggcatggtcatgggcgcctgtaatcccagctactcaggaggcagaggcagaagaatcacttgaacctgggaagcggaggctgtagtgagccaaggttgcatcactgcactccatcctgggcaacagagcaagtctctgtctcaaaaaaaaaaatctcaaattgtatcacatatttagaatattgtttccctccagtatcacatacaaacttggtttattttaaaccattgtctgttacaataagatcagactattgtatactgggattatatgctagcagtgtaggaggtagtgatttttctttgatcatagaccgctgggattaagtgttgttagtaaatagggtagtggcagatatacagtggtagctgagaccattggttacatgttttgtattttggtatattggattgctacaaagactccttggagaccagtttatccctttacatcaagaagccaaattttattttcttatttaaaagataaaatggggccagatgaagttagctcatgcttgtaatctcagcactttgggaggccaaggtgggggattgcttgaggccaggagtttgaggccagcctgggcaacatagtgagcccccgcccctgccatctctagcaaaaaaaaaaaaaaaaaaaattaggtgggtatggtagcgcacacctgtagtcccagctactccagagggtgagatgggaggattgcttgagcccggtagtttgagaccgcgcaagctacgattgtaccactgcactccagtgagaacctgtctctacaccataaaattaaaaaataaagtgggtaagtgctcactggaaagactgttaggaaagttgaaagatgacttttatgattttatacatactagagtaaactttttttcctaaataacatttaagataggtcaaattaatgtatttttaagcatttctgatattacaatattttcaggaaaatagatttttaaaatattaaaaatgcttttaaaataatttttaaaatcttttaaaatgctttgtcatgagaaaaatccattttaaatatcttttttttgtttggagaccagagggcggtggtgtcatcatagctcactgcaccctcaacctctcaggctcaaatgttccttctacctcaacctcagcctctcgagtagctgggaccacaggcatgcaccacctcacctggctaatttttaagtttttttgtggagatagggtcttactgtgctgcccaggctggtcccaaactcctgggctcaagcccaactcctcttgcctcagcctcccaagtgctgagattataggcatggctggctgtttttaaattatcttatttaatatttcgtgtataaaatgaaacagttgaaagctgtgttttttaagaattatactccactgattaaaggaacagtagataaagttcaggtctcctagccgctttgtcttttttttttttttttttttaatttttgagatgaagtctcactgtttcccaggctgaagtgcagtggcaagatctcgactcactgcaatctctgcctccctgggttcaagtggttctcctgcctcagcctctcgagtaactgggattacaggtgtgtgccaccacacccagctaatttttgtatttttagtagagacggaatttcaccgtgttggccaggctgggctcaaacgatctgcctgtcttgccctcccaaagtgctgggattacaggcctcttttttttttttttttttttttttttttgagatggagtcttgctctgtcacccaggctggagtgcagtggtgtggtcttggctcaatgcaacctgcgtctcctgggttcaggcgattctcatgcctcagcctcctgtgtagctgggattacaggcgcacactaccacactcggctaattttttttgtatttttagtagagatgaggttttgccaagttggccaggttggtctcaaactccttaggtgatccgcccacctcagcctcccaaagtgctgggattacaagtgtgagccactgcgcctggccctctttgtcttttaaagataaagaccatgagactgttttaggttattgcttttacttataaatattcttggaagtattggcaatttagattttaaaaatttactgttcaatagctaagtaagcacacagctttcataatcatttctgtagcatacttaccctaaaatgaatcaaattacaatttctctatatagtaggttattcttgcttgagtctcttctgtctgtctctcttttttttttttttttttttttaaagaaatgggtctcaccctattgcccaggctggagtgcagtggttattcacagactcaaagtgcactgcatgcttcaactcttggcctcaagtatcctcccaccctcagcctcttgggtagctgggactacaggtgctcaccaccacacccagctcttccttaataaatgttttccttagcatggtatttttagttaataattcttagaattctttttaaagatttgcctccctaccaagacatgcattagtcgtctaaggttgcctgaaaaacatgtaaaaagcttgtaatattgaaaaatacatagtaattctagctggttgactatcagtttttcatttaagtttttagcatttggtcttgcttttagattctcatgtcctttattatagttaagagagaaaaatgctttgaaaattggtttctgcctgtgttgtatgtcagtacatataataagcataatggacatattcttctcagaattattaaatataagtgattttctaagacaaaaatactgtttagaaattatcttttatgtctttacatactttgtaactcatcctcagttatatagaaaaattgtgtcagaaaagaggacattcaaaagaaagaaaagcacaaatatggctatatgtgcattcccatgcagaagaaaatttgtagcatatgattgtttacattaaaaagtttctttgagaaaagtaaatgcatggaggcttaaaactatgaggaaaaaacccaaatcttaatgtttcaactagtatcaaaaatcatatttgatgtttataacaggatattagagtcacactcttgatttgatcttttcgctgagtcagtgtaatggcaccatgtatttgtttcattttccaaccctgctggtcctgagttgcctatattctctctaaattatgcttgcaagccagtaagctcttttctgtattcatctcttttagtactttatctagtatagctcttcaaaaccaatttacattttcacttgatctgttctttaagttcgttaggtacattttctgccttgcagattatttctggcaatgattccacaaagtgtttctccattatatagcataggtcatcatttcccagtctctcataagtagcttcctcatcatttctctagtgtcctagattactccccacctgccatctagtcccagagcagaagccacatgtttcaggtttttgttttggcagcacctcacttttggtactaatttctgtattggttattttactgtaatgaaaccatccccaaaacttagtggcttaaaaatagcagttatgtattctcattcgtgtaactggaggtcaacttgaggtggtggaggtggggagtggttagccagttgatgccatactttatgctttaaactacagattaggtagagatctattccgtattatttctcattctcctttggccagtgggccagtctggtcatattcttttatttatttatttattttgagatagggtcttgctctgttgtccaggccagagagcagtggtgcgattatagctcactgcagcttcatactcctgggctcaagcaattctcctgcctcagcctcttgagtgtctgggactatagatgtgtgccaccatggcttgctgttttttaaattttttgtagagacaggctcttgttatgttgccaagctggccttgaactctgtacctcaagtgatcctctcaactctgcctctccagtagctgggattacagttttgagctaccacacctggctttcagtttttccctttaaataagcaatagcaatggttcgttcctgagtggatagttctcaaagttattattaacagtctcttatcttgattttgtggttattttagatatataccctttttactaaagcaaatgtctttagtcttcataattcttcaaccaataattattccaataagattaactttttttttttttttttttaaagatggagtctcactctgtctcccaggctggagtgcagtggcgtgatctcggctcactgcaacctccgcctcccgagttcaggcagttctcctgcctcagccttccgagtagctggaactataggcgcatgccaccacacccagctaatttttgtatttttcagtagagatggggtttcaccatacggcacggagtagtgtcgaactcctgacctcgtgatctgcctgcctcggcgtcccaaagtgctgggattacaggaatgagccactgcgcctggccaagattaacattttaatcagagttagaaacaagcttatttttttttttcttttattataaactgttggttaaatgcaatgtggtatcttggattggatcctggaacacagaaagtacataagtagaaaatccaaataaagactggagtttggttaatagtagtgtatcattgttaattgcttgtttgacaaatgtagcatgattatctaagatgttcattaacattaggggaaattgggtgaagggtatatgggaactccctatgctgtctttgcaacttttctgtaaatttaaaattatttctttttttttttttaagacggagtctcgctctgtcacccaggctggagtgcagtggccggatctcagctcaatgcaagctccgcctcctgggttcacgccattctcctgcctcagcctcccgagtagctgggactacaggcgcccgccacctcaaccggctagttttttgtatttttttagtagagacggggtttcaccgtgttagccaggatggtctcgatctcctgacctcgtgatccgcccgtctcggcctcccaaagtgctgagattacaggcttgagccaccgcgcccggccttaaaattatttcttaataaaactttattaaataaaaataaaaattattgacgtgaggaaatgtatagtaatgactgattaatatatagaatttataatttataaaaattaaactttaatataattcaagcagaacagaatggtattataaattaaaaaaccttaaggattcctgctcatgtatccaagtcccttccccagaagtaaccaggttggtttttttttttttttaaactttgttttacttctggtggttactgtcataattccagagatttttatactgtctctgggccttgatttatcaactttcaacaatgtcactgctctttctttctttctctctttctttttctttctttctttttctttccttccttccttccttccttccttcctttccttctttctttctttctttcttccttttctttcctttttcctttcctttttcctttcctttttccttttccttttccccttccctcttccctcttccctcttccctcttccctctttcctttccttcccttcccttcccttccctttccttccctttccttccctttccttccctttccttccctttttccttcccttcccttcccttccctgcccttcccttcccttcccgtccctttccgtcccgtgccgtcccgtcccgtcccgtcccgtcccgtcccacagagtcttgctctgttgcccaggctgggaatgcagtggcacaatcttggctcacttcagtttctgcctcccgggttcaagcaattctcttgcctcagcctcctgagtagctgggactacaggtgcctgccaccacgcctggctaatttttgtgtatttagtagaggcagggtttcgccatgttggccaggctggtttcaaactcctgacctcaagttattctcccgcctcagcctcccaaagtgctgggattacaggaatgagccaccattcccagccattgtcactgctttcttaacaagaacagtaagtttttttgttgttgttggtttttttttttttaagttaagtttttctgtcagttatattaatttttgttttatttttatttacttatttattttattttttttgagacagagtcttactctgtcgcccatgctggaatgcagtggtgcgatcttagctcactgcagcctccacatcctggattcaagtgcctcagcctcccaagtagctgggattacaggcacctgccaccgcgcttggctaattttttgtatttttagggagatggaggtttcaccattttggccttcctggtctcgaactcttggcctcaagtgatccacccaccttccaagtgctggaattatagatgtgagccactgtgcccatcctaaaaaaattgtatttctattaaaagcattttttagactagtcacatgcagtagtggaaaggggaaagagtagaacaagttctgtctgcactaactgaacagtcaattgaggtaactcactaccttcagactagcctctgtcagttacatttgtaacttgaataacatgcttaaatttgtatttcttgttctatcaagtttagacattttgtatcgactccatatgtataagatatagaaattcttagctctgtattgcttttcacctcttttcgaccatctattttcccacttctgttaactctagcattacttttactataattttaattcactatgttctgcttaaccagaagaaattcaagagggcttatacatatataaaacagattttgagttgattaatcatcatagtttaaaaaactggtttttaaagatgaattattaagataaatgtgtggagaaggaagaagaag

SEQ ID NO: 1060 - DNA, 32306 bp, Mus musculus
  source 1..32306: mol_type = genomic DNA
ctctctggtcggaggcggcggtaatggcggatggtgggttgtggcgccggcggcggctgctgtgagggacgatgagttcctccttcgtgtcgaacggggccagcctggaagattgtcactgtaacctcttctgcctggtgagtgcgggggccgcgggcggtgggggagggggccgcgccgtgcgcccttgggccgtgggggagggggtctgggtcgcatccagatgccggtgtcccccggctaggccccgccggagtcggcctcctccgaggctctgcggccgccccgggaggcagcgtccgctcacctaccgaccggggctctgctgggaagaggcttgtctttccccccaccccctcggtctttctcctcctcctgtcttgttttggactcttttccccatcctagtcttttccttaacttgggctgcttatctgcccggatagtaatattttcttgtgtgcttcttgcttccccgcctccccgccccccgccccttgtatcgaacagtgtatcccttttccacactttccacgattgcccctgctcgactgcctttaagctcgcttttcccttgtaagtgggcttctcttaaacaggacccccccaaaaacttacgtattaaaaccctcttcgttttgtaagttaaactaatacaggggtagtgtccttatgggtgacttcagatctttgtgtaaaaacagtgtgtgccggttcatatgttttctttttaaactttgaaaacattttgccattttgacaatttctagccatcttgcttttattagaacattatgtttttgtgagagtggaggggcaagtggaggaggtactgtggtttcgcactaaacgttctatatttgtctgttttgcttacgttttaagaatgttttgagctggctgttccttttattgaactgaaaagtctggggcagctggaattagggatgttctagtacgtgtatgtaggtcggcccaaatcggataacactcaagagttaagacttttgtcaaaagtaccaactgttgcaaatatctagtcctgaattaaacgatagccgagcttcctgaatgactaagttagagtgacttttttcatttttcgtgtgctctgagaaatattaagtctatcataggtaagtgaattaagtgggtggagcataactagttggcaagcataaactgccagtcatgtatcagcagtttcatttttggcaccttatgctttctgtcactaagttagaataaggaattactgaatttcctttgttgaatctctttcacgatgtggtaaatggggatcttcagcacacttacgtcttacagattagactggttttcttgacatgtccattaatcagcatctcgtcacatgtagtaagatgtacagcaggtttaacgtttctgtcttccccaactggatctatttttggcactttgggtttttttttttttttttttttttgaagctagattagcacaaatctgacagctctttggaagtggttctttccttggagctgtgtgcttgtggagaattaacaggctttttttttttttccttaagaaaaaaaaaattcagatggttttcgtattagagccatgacttcttacaaacctggaatgagagtctttactttccagttcaccaaggatcaaatgtgactgacagagaggactgtaggacagaggaggaggctagacttactgtgcaggcttagcatcattgtctcattggtcagctctggatatgttgcatttattgtagacttgctactcagtgacatctttgataatttatgtaacagttttgtgttcttttccttaagctcttgttggttgaaacattagaattctttgctgtggtgtttttggtttgtttggttgtttattttggtcatatctttaggtacttaagcatgcattaaaaatagtgatgttttaatgaaatcaaggactttatagtgaatatatattttatatataaatatataaatagtatacttatattattatacttaataacaaatatttattacttagagtgaatgaacaataatatagatattttgctttcttttccttcaggccgacttgacaggaattaagtggaaaagatatgtatggcaaggcccaacttccgcccctattctgtttccggtgacagaagaagaccccattttgagcagttttagtcgatgccttaaggcagatgtacttggtgtttggcggcgagatcaaagacctggaagaagagaattgtggatattttggtggggtaaagatcccaattttgctgaccttattcaccatgacttatcaggtgaaagcactttatcctttttaactgtgccttagcaatgttgtacactttcccaatgtgcttctgctgtggtggacggccttgtcagcctggatctgtaagagggttgccatgctctgtttcaccatctttgttttggtttccttaagttacctgtgtagattccaggagacttgaactctgactgagtttcttcctctacctcccggcttctttctgtaatttctcacaggcagtttgtatctagggaaagcattttcattaacctgagaaaaatggaatctggaagcatgttatttttacagttatataatagtcttgaagccaagtgtaactcacctttgagtctagtttgctgtgttcttttttgtctgaccccgtgggcaggcctagaaatgtaactttgtttggcatagattttcaaaagtatagttgtattttaatattatttatgattatgtattaactcggggaggcatatgctgtttttggggggtggggggtgggagggtctttagaccctgcttcgtcaaagggtatattagtaaggacaagggccatctcattaacttttaaaggacaaaggtcattatctgaaaggttgtacagaaacggtttattatgagcacatcaatatttcttttttttttattttcttgacttttagggccaaatatactttagaaagaaactatagccctttatgaaaattactggttatgtttattttaaactcagtgtaagtgtatctttgactagatactctcggagggaaccaagttctagtttgataagagttttgacagctaaattgaaaatttttaaggtctttaaaattttctgtgtgagcagggagtgtaggtgtgggtgtagatatgtgtgccaccatgttgtgtagaggtcagaggacaacgtttttggagtcctgcttcttccatcttggtgagacagggttttactgattgttttgcccttaggaagcttatttcgggccacctggccctctttgtttctgactgctcctatctctgctccccttcttggtgtaggggtgctggaattacagatgcaccacatctagtttttttgtgtgggttctggaaatcgaactgagactgactagtgtttttactctatccccgagccatctctcctgctccttaggtcttttgaaaaaaagctttcttgtatgaaagttagttttctgtggtttatggttttgaactgtaggatctgttttattttgtatgaaatataatccagaaatcatgtagccttacttaaataaataccttaagtttactcacagggtttagtcttcttgataaagttggcacagcatctgaatacacttttttatttgagacggagtctgtgttgccttgaattcaaagcccccttcaagctcagcctcagtcctggttggtattacagctgtgtgctactctgtacagccttgaacaaacctttccatggaacacattttatgccctttgaactcgtattccttctggttcctgctggaattagagatgtgtgccatcagactaggctccagatagctctatcttgaactaatactttctaaggtcaacatttgtttaagaatgcgccttttatatatttttaagtcaccttttgtttttaatgaattcttcagcattttgagagtggtgcagttgttttatgatagagcattctggctttcctgaaatgttactgaagaacctagttcttagttctaaatattataatgtgtttgtgattttgcttgttttgagacagtgttacacatagtccattagggctttgaagtcctgattttcctgcctccacttctcaatgctaggatcaaaggtgtgtgctactacacttgacttatacagttttagatagtaaagagatgagtgtatatctgtaaatgcatactgtgttgtctgagtgtgtatcagtagccttcgtgccttttagcaaggtgtgctttctgcttcatgcactaaatgctaagcatacagcttccttttcctttcattgacttaggtgagagttattttaaacattgaaatgattcatgaagtcacctcagttaaagtgtttgtaggttgtttgtttgtttactttcttttaagtgctaagtattgaatcttgggccatgtgtatatattaaccaagtgctctactgttgacctttatccctggctcattgttaaaatgttgatagactgtttagacactgttgttaaattgaaatgtttaagcaaacacagtcagtgttaaaactataatggtgctcagagtgtttggctagcctgagtaaggtcctggctttgaactcccaataccacaagaaattatatgaataccttaagtctatgagagtttagtcttcttggtaaagttggcacagcatctgaatacactttattatttgagacggagtcttgtggtgttccttgaattcaaagcccccctcaagctcagcctcagtgctggttggtattacagctgtgtgctactctatacagccttgaacaaacctttccatggaacacattttgtgtaatcaaagataagtttaaatacatagtgtttagttttaccatagtgattctaatgttttgaaggttaaaagtctattaaaatagaatatgagctgtttaataacaatgtatgttgttaaaacactttgtgtagcttttttcttctggatttgaggtcatcagaagtgtgttcttaagcaaagcttggttagagtttaaagtttctccttccttctcctttagcataattttaaaatgacaatacctgcactctaatacagatactgatccttgaatataatcaaaattttgttgctgtcagagtctgctgactgctattgaatagctaaatatttttatcaaagtggaagtgacccaaagagtgagcacacacactgttgagtagcatgtgagcatgtccactgtctcaaagctagccctgaactcttggtttacaaagtcagtggtatttatataatgttttagcttctttttaacctgttgtttactttagaatgttacttagatcagactatcttaaagaataataaggtcttttcagatggagtatatttatcttgcccttttttttttttttttttttttttttttttgctccagggacaccgtctgcctcccttttggggtaattagtgcgcctctgtgctctagctaacccccttttcatttcttcccatctgtggcactcggttcccttcttttaagctcccttgagaagagagcagctggacagtaggggtggcatcagctgcatgaggcagtcctgagctccaagtggaggtgtagcagtgaggaaagaggaccaggaaggacccaggtggtgactaagcagctagttaatttggcttgggcctgctcttctcagtcagtgtccctctgtttggttcaacacctactacttcttgttactgacatgtttgtgattatggaaatattgccctccttatagggggtaggaggagaaggtaggcaatcatttttgtaaagattagaattctctgtttgtttttttcccactgatgtgttcaataacaaaaccacagagtagcccctttatctactctgtctcatctacagctgtttttaagaataattttctttgaggtaattttagatttatataaatcttggtaggatagagtagagagtgcctgtgcatctcttacttaacttttttttattcttaatatctatgtcagaatgatggactttctaaaactcataaatcagtattgttatactaaaatacctaatcacttggatttctttattttcacctagttctgttgtttttaggagctggcctgggctgccaaatgatatttacctgccctcttattttttgctcttctgggctttgacagtttctcggggaacctccctgctcctttttgatgattttgacagttctaagagtctggtgtctagtcaggtttcgcagtgcatgttaaatttaaccttctcttctgcctcacaccatttaacacatttctgggttactattaagtttagctaatgtatagacagaaaacatagactgagtaaattgtattctacactttgaatttttgcttattttgtatcagtagtacttgatgctgtttcacaaagtgatttgggaaggtctggtgatttttggataaggatttgtgctcattggtattagcttaagtataacattccagaaagacatttgttaaagagaaaaatcccttgaatttcaaagccaaatatatgagtttttattgtatttataggagaatggataggtgaatctgtgttggtttattctggttacaggtttttgagttgtttagtagtgtgtgaatgacagatgtaaagttggtggtgggaaaatcttagctcactggctcctgtcaatttctccagtgggtgtgattgattgactcttttaaatgtactgttagttagttcgctgttttaaaaagcaagattgttttaattttgcttggtgtgtcttggagcatgtctgtgtatttttactctgtatcctaagatttcaaaattttattgcagccactggtttttattcttaaaaacaaaactattcattctcccaagattgttgtcttaaaaaaaaatcataaggtagattctgatgagactttggattccttgaagtaaaaagtatgctgaatcaaggctaaaatatgtgttctttttttgtggttttggaggtctctatataggagtttagcaccacatccagatactttcattatagtatagttttgtagtgcatattgcttagctgggtcattattccagatttaattttggatgcttttatcagaggacatcaattatagtggactttaaccttaacgggcagcttttagcagagttgatagacacaaaagcagcaacctaagacatgctgaagaattatttctatctttgttttttaaacttcataaattgtgtcccatttccttggctaatcttatgagtgatgactgtgtgtatgctctgtagtatccttttttgagtaagaaagtgttattgtttagatcgtcatgtcagatgtaacagtcacctcagtaagctgttttaaataaatcttcaagttttgaccctaagtgaatgatgtgatagctattatttgttagatagatatttgttgatttaatgagttatgaatgagaaataattattaagagagacgctgatttagacatgttgattttttttcaagaaatctgtactattttcttttcctaacatgctaatttttgtgtcattccttatccattggcatatgttgcatcttagctgtttagcaaaattattgggaaaagatgcctttttaaaaatcggctgatcaccatggagacatttaaagaggtcatttttgaggaaaatgttgaatattggttgttatcaacttttttgcttttgatactaatttttttctaattcatagttattttgatgacctatgacacatcctttggcactcctataatctgtgttcttagtgaaacatacagctttagcatttgaacttttatgttgttgcattctacagctaaatgtgcaaaattttttgagtatcactggtggttaagatttctaataccaatagtaatggaaaagtactaaaaacagaatagaaactttgttttctctggggattaaagatacgagaggggggggaaacatttatttaaatgcattaagcagacttttttccattagcctctggttaagttctaaagtgcctgctaaagcttccatgtgttcccacctcctttctttccttgttacagtgctggtgttgattcaaggagcttttaattagtgtaagataaaagatacacagtacttgtcttaggtggttggttctgccgttcactgtttatatctgtgagtacagtatgtagaaagtactttttgtttttacaacatcagggaattagaaactggattcagtacactttttgtttctaggtgacactcttcccaaaacagaacctaaatttctttagacttttcattgggtattttattaggaattagtatttcattagcaatgaaaaatggaatagttatttagtcacttaccatgtacatgaaggtgtagatcagggttgtttttttttttttttttttttttttttttttttttttttttttttttttgccttgggtgggtcctgtttgtactaatgaaaattatgagcttctgggacaagagcctcctgaaagcattaagttcatgctaaggttctctagataaaagttaaagcaatgagacaagtccttaaaaattaatcctgctttctaaaaagtgtgtgtgtgtgtgtgtgtgtgtgatacatgtgcactacacatatgtggagatcagaagacaactttgtggagttgtttctcctaatcttatgcaagttctgaggatcaaacttaggtcatcaggctgtcagcaagcacttttaccctctgaactatcttgctggccttggttagctaaaccacatttggtattcttagcttagatttagtcgaaatagattttaaaaaataaagactttttttatgacatgtaaaaatgtataaacaactgtaagttttgcttttctaaagatttttgtttttaaatgcaaagcagttcataatttgctgaacagtttttaaaatataaacaacattcatatatttatttttgtgattgtgtatgtctgtggctatacaagtgcagtgcacacacatggagttcagagaacatctgtgggagtctgttctttcctctaccaagtaggtcctgggattcaaacccaggtggttaagcttgctgagccattattattggttcaaaataggcttttagtgaattggaactttgtgcttaacactcttgttttaaactgtatgaagaggtaaattattcataagttttaaatgaatttattttgaattaatctagaataattaatttaaatgaataacagtttgtagcttagatatgtatagaagtaactgtgtatcttatgtcttcttaaaacttagcagtagttataatgcaaagatcagagccattgtgtttagaaggtagggagttttgaaggtaacaaaggacattgaacaggtggggaattgggagcagttcctggcatatttcttttggaattatgaacacatgtatttctattactgttgtcatgtaatttgagatacacgctttaatgaagctatttgactttgaaatcagaagtccttattaagccaaaagatgggttcttatttcctcttagctgctcgcacatatgcttgtgatctagaccttaaataagtgaggtcactatgagccagctccttttctctcaggatatctttataataagaggagacccataagcatctgagctgtaagtgaagtagataaggatctctaacataactgaatgggaagttttcctacttaaaattactttattctagcctgcgagtattactgatttcctttgtttttctgtagaggaacaatattagttgctttgaaaggtctgacaatgatttgggaaagaacacttgaaagaagaacatacaatctgtgttaacctttgtagtggcagcttccaatgcagttcaagcccacggtcgctatggtttctagttaatgtttaccctgaccatttgctgtaatacattctgaatataaactgagtgccactcttaatacagctctgtttttattcaaaagctcatagtaaatgttatttttctaggttcagcatgtaagtttgtgaactgagaaatacttgtcctttcattttgttttgtttgaaaattaaatgagaacaagacatggtggcacaggtctgtaacctcagcacttgagaggctcgagaggcggagatagaaagatcttgagttcaaggctagccttctagagcaagctcctgtctcaagaagaaaataggtgatggtgcataagtcggaaatgtttagagctgggagtggtagctcacacatacaatcccagtactaagtactgagacaagaggattgctgagagttcaaggccaacctcgtctatgtagttagctccagtccaggacaactgggttaaaaagagaggcaaaggaaaggtcatatatataaagatacagtatattagaagattcctaattatatttgggctaacaaaataaaatgtaagttgctgatgtggtacctatcattatttggtacccttgctgaatgttttgttacagataaaagagtaaattatgttctctgaactatgtctagacttactagtgattgatttctgccccctactccctaccccgaaacttaacttagagtgattaatagatttagtgggaaatttgaggctatgtagttagtgaagagcaatacttcttctgactgatacacgtttttatatttcctcctatactgaataatcatgtgagtcattgaaatgagatctgtttgataattaacacgttgcttggtagacttggtggcagcagcttcctttatactcatcacttagttttgtagttgagtcatagattagaatgctgattgtcatgaaatattttgagtttaattattaactgatagactttctgcccctcctccttcaggttaaatgattagaagaattaggacaaagtaacaagtgagccagtttagaaacaggcatcatatagtatgcttaatattttccaggttatccaaatcaatacccttttttaaaatacagaaaataagactttatgtttatgataccattgctatcttttatattgtggaaaataatttttaggcagttttgtagagctcttaggtattgtcaatcttgcaggatatctttgaaacctgatgttttgatgtttaaagatgtattaaagaacagtaagtatagtggtgcgtgtttgttatcccagcactcagaaggtagaggcaaggttgctgtcaagttccaggccattcaggtctaaatagtgagactctcaaaaacagacaaacaaacaaacagaaagccacctccacacccccacacacagttcaagagatcaaaagattgcagctctgcattctgaggtaaaggagagagctatggatatagacattgatctgtcacatatttagttttcccggagaagatgtagtctcactaacttactttctacttgatttttttttctttagaagaggaagatggagtatgggagaatggcctttcctatgaatgccgtactttgcttttcaaagcagttcacaatctgttggagcgatgtttgatgaaccgaaactttgtacgaattggcaagtggtttgtgaagccatatgagaaagatgaaaaacctataaataaaaggtaagctgtcttattttcctcttttgatagttgatgtttgttaattttatgagattaatagttaatatattttacaaaacatattcagaagttaatgttggcagagtactataggtatttctgtccctctccctttattcatgtaagaagtttcttgcaatgggaatgagctgtatatatgtttttgagagggggttgttttttgagtagtgtctcacctgtggacctgactggcttggaacttgatttgtagactaggctgaccttgaactcctgatgtctgattgtgttttgtgtagggttgacctatttaatttttaaagatttatttttgttttgcatgtatgtgtaaatgtcttgaatgtatgtatagcatgtgagtgcctgatgtctgaggaggccagaagagggttttgtatcctttagaactggagatagacatggttgtaagctgccaggtgggaggtgggaatggaacccaggtcctctgcaagaatagctagtgttcttaactgctgagccatctccagcccctaaattccccaatcttaagtggctttaactaaagtaaattggtgttctgcataagatgtgtttaattttagagaagttaattttcttgagctttaaattagatttatgacacagaaaaataaaaaagttgcagatagaggtacatagatttttagggcaagcatctctctttctctttctctctttctctttctctttctctttctctttctctttctctttctctttctctttctctttctctttctctttctctttctctttctctttctctttctctttttctctctctcctcgtctactgcttagtgtagccttaggtatcctggaactcattgtgtagctcaggctggcctcttgctcacagagactcacctgcctctgtctcccaagtgctggagttaaagtagtgtgataccactgcctgaccagatttgtttttaatggaaaaaatatgtttttagttttttaagataattgtatcatttttccttctcttttccctctctagcttctcctacctttattctctctttgaatttatggactgtttttctttagttgttgttgtgtatgtaaaactctgggcatggtttggagtgggtctattaccacagcactgcggggaggtggagctaggaggatccctagcacttgctggctgccagcctagctttagatttggtctcaggggctaagatggagagtggtggatacacacacacacacacacacacacacacacacacacacacaccctcgctgtctgtgtctctgtctagattgcctttcttgtgtcttcctgtctccccatctcttttgtggtaatagagatcaaatacatgccaggccagtgctctccccactgagttgtatttctagtatttagttgtatttttattttgaggctacctttcaaagttgcccaagttggcttcagacttgtaatcttcctgtgtcagcctctggagtagttgggattgtggcgtactgcatggtaagtccagggagatattcattttctaatattctggacatagacctagttaatttgtctactagttactaaggactgaaagacaagaagtggagtcaccttctagtgcattgaggaaaggtataaagaacctttcaatttatgagtagttagccatggaatcaaattagtctttagataattgtataaaagaacatctaatattttatcttaaatagttgaggggttgttctgcagtacatgggttttgtgctagtcactaggtttgccagtaagattataggaaaattggatggtataagaaccagtgacttgcgatgcttgattgtatatccaaataagactgtcttgagaagagtattatgagtttgtattttgttaaacattttgtcatgttgaatctcttatagccattttgctgattgggcagttaagtttgtatatttggcaagattttttgttttttcttttgagccaattctcattgtgttgtccattgattcctggtgcagttgatcttcctgccttgcctttctcctagttggtattatagataggctctactgtactggctaacatttttttatccattcatgcccccccccccaacctacccctgtgtgtatatggtatgcttgtattatagcatgagtggtttcatgtgcctgtctgtgaaggtcagtggatgtcttttagaagttggttatcttctgttatgtggttcctgggaacagaacttattgtcagatttggtggcaagtatctttatccatttagccagtctccccagcccctcacttagcaagtttcaaatgtgtctaggaagatatacagggtagaattacattggtctacaactctttttttgagacaactgataccttacagagtatattgacataggagattttgctaagtagcagatgatactatatacaatattataaaatttgtagctcagactggcctggaataactgtagcctagactaatctagaacttgaggtgctctttatgcctcagtgttcagaatattgggcttacgggcaggatttaccacatctggctaatattcaattttaatatataccataatcttatcctatacattcagttatagatatgtaacttttttttgaaaacaatattgctaattttgttagtagtctttgacatttttattctatatatattagttatctttagcctcaattttaaaaggcaatgtattttacaaaacctatacatgtgagcatgcatatacatgtaagcatgcatatatacacacacagagacagctataaatacaggataaaaaaattcatggtagatataacaaaaaagagataggatcaagaatgtggttcagcgtgttcttgtgtcctgggaaagaacctgatccacaaagattaagatgttcttggtttttgttttgtggggaagaggagaggaatacctcaagcatttgtgatatattgtcgtaattagaatattaaagctgagcatggtggcacatgtctgtctgtaattccagcacttcagagactgaagctgcaagttcaagatcaatccagactacatagtcttagcgcaccacaactgccccttacccctcaaaaagaaagaaaaggaaagaacattagggtggaatattgaaataatgatgcttttttccccttgaaggtgttttacgtctgtactgtttactgtaatagccactagcttgctgctatttaaattcaatacattgaaattaagataaaaaattacttcttcagtttcataagctacacttattttatataatggctgttgtttagtataataatgtttcagagatggggcatttctatcattgtaggaacttcttttggatgatgttgcctttataactaacagtgcttttagtgttttatacaagcagttggtcaagtgttttatttttttaatcagtaggcagaagaatattcttatatgctttaaattccataataaaactgtttattcctacatggtggcttctgcattatctcctgatctccaaaattaactaaaagtaagcaccatgatatgtaaatctctcctggaaaggaactgggagcagttagtaggtttaggatgatctttgttccttggctatcttactacctctgaacaggtgaaggtggtaagaggcattgctatgcgttgttcttgtttgttcagaggggatcatgcttatgtagcctagcctggccttgacctgggcctgtaggcatgcattactatgtctcctttacaagtatgtttcttttctttgtgtctctttagtagcataaagaaataggatgaacttgagccacatgcatagtgtaaaatttctgttacagtgttttgttttttttccagacggggattctctgtgtagccctggctgtcctggaactcactttgtagaccaggctggcttcgaactcagaaatccacttgcctctgcctcctgagtgctgggattaaaggcacgtgccaccacgcccagctctgttacactgttaactgagcttggtgatgtgtttgacaggtgtgtgtgtgtgtgtgcgcacacgtgctgagtaaaataaacccaaatcaggtgaaactaattttaagaatattttagccaggtgtggtggtgcacgcctttaatcccagcacttgggaggcagaggcaggtggatttctgagttcgaagccagcctagcctggtctacaaagtgagttccaggacagccagagaaaccctgtctcgaaaaaacaaaacacaaccaacaaacaaacaaacaaaaaagaatattttacttagtttggtacacttgaaatactttttagagtgtaagtctattacctctgagatagtttacattttttgtatgtgaggcctttgaaatctagtgtgtattttctcctcagagcacatcatgatttggattggccatagtccaaatgatcataatgacacggtgattgtttaacagctagattctagggctttaaacttagcttgttaatgttagttgcttattgcttattggtgatctcttcctggaacagattttgttctaagttgtgtgtggtagagtcccaaaggttcctgtgccaaagcatccactgttgcccagttaggctcgttacttcagactgtccattttccctttctgtaggttttctaaactgatctgttcttactgagtttgatcttgcagggtggtataatagctataccttgatgtgttttgttagttcataaatcattaggatttgtatagcttttaacattttcatctttccaggactattttgagaagaattaaatcctaagaatgactttcacccttttcacttttttttccttactgctattttctactacagttcttagtattgactcaaacaatcttttttcatgattgtttttagatgctaatgagacttttttttttctgaaatgagggagaaagtaagggggcattgcctaagtaggactgataaggcactgttcagagttaagagtttaccataaatgactgcagatcttaaaacaatctatctagctttatacataatgaaatgtaaagcacatagcagttcagcgactccttcccacagtactacacaggactaagggttggagttgattactgggacatgaaatacaagagaacttctaagccctattaggcagatgtatatttcatacacttacatctttttaaagagtagtagtgagtagtaaaagcagagaatagcgaaagtattaaagatttcaaactttatagagtaattgttttctaaagattttttactatataatgttcagtaacgtgttcattaaatgtgtagaaataatagaagattcagtgataacatgctttgggattttaaaatagatactttgttcatggagatatattaagaatgttggacattgctgattaacggtagcttgcaatgttgtatggaaacaacctagagaatgtccaaagattattgatattagggctggtgctgtaggtagtggagaacttgcctaagcacgaagccctgagttcagtctgtagcacctccctgcatttgggagatggaggcaggaggaccaggagtttatggttgattacatggtgagtttgaggtcagcctgttttgcatgtgctcctgtaatcaatcaatcaatcaatcaaattattgctggtgctgatgtcttaacctgagcctgttacattggtgaaccttaatgtataaatttgaaagttattagctgggcatagtgaacgtggctttcccagccccctaggaagcagaggaaggtgaatttctgtgagtttgaggccagcctggtctacagggagagttccaccacagccagagctatagagtgagagtctgcctcaaaaccaaaaccaagaaataaactataaataaataaataaattggaaaaataaaattaaaaaatagaaaactattgaattcatggaataaaattaatctgggaatttaagataactaggtttaaaatattataaaaacacgtgtaacaaaattaatcatttttgccttttttccagtatttcagtggtattaaggaaattgacatggtggtacaattgacatcttctaccctttggtccctttgtttttatttttttccctcaaggtttgttttcttgttttctttctttctttctttccttccttcctctccctctccctctccctctccctctccctcttccttccttccttccttttattagatatatttattttatttatatgagcacactgtagctattttcaggcacaccagaagagggcattggatcccattacagatggttgtgaactaccatgtggttgctgggaattgaactcaggacatctggaagaccaagcagccagtgctcttaacccctgagccatctatcgcctaacttttttgttttttaatgagtgttttaagcacctcatataagtgaaagtatatatttgttattttgtatctgacttatttcacttggcataccttcaagttttatccacattgtagcatgtgggaggttttctttttttttcctttaagactaaacaataactcattgttcatgtagtgtattgtgtacttgctcattgactggcatctgagtcacttctcattttgactgtttgttgtaaacactagtgtgctttccttaggtccctgtttgtcattcttgtggttacacactcagaagtcaaattgctgcattttatgataattttaatttaattatctgaaaaattgccatactgtttctcactgtggctacagtgtttgacattttcattggcaatattagagtttcagtttcactgcatccttaacaatgcttgttatttactggttgtttgttaagtaaccatttttgttggtgtgaagtggtatcttctgtttctgatgtgtagttccttaattactatggctattgagcatagtttcttattggctgcttatatattgtctctggaaaaatacccaactctgtcaaattttaattgttaggattagtatgttttgctttttgtgagtcagtactttgattttgtgacgtatacatgtgtgtttgtgtatgtgtagaattagtagattaatcttggagatcaaaaccagggttcatatgtgctagactactgctgtactactgggccgcatccctagctgtaagcttttgattttaaaataggtcatagcttggtgtggtggcgcatgccttgaatgccaacactagggaggcagaggtaggcagatctctctgagttgaagcccagtctggtttacataatgagttccaaggcagcaaggactacatagaccctgtttcaaaaataaaaacaattacaacaacaaaaccaagtcatagaaccctctttgggcctcaaattctctaccagcaaaatggaagattgttatttctatagcttcctaacacatgctgagaacagatcatttgctccatagcactccacacacaggcatgtgcatgcatttatggaggcacacatctgttatcctgtgatcttggtacttcggaagtcaaagcagaagatctcaactttgaggccagcctacaggacaagttcagtgctagtctgagctacatacattatgagaccttgctccaaagcaagtaagcaagcaagcaagcaagcaaacagaaaccttgttactagaagagctgactttcatgttttgcttttttgagatcactgtgtgccaggctgccttttattcctctgcttccttctccctaagtactgcaatgtctagccctaatggagctaactctttgaacttgagtatgtcttcttcatcatcatcatcttcttcttcttcttcctcctattttagaaaataatcttttagggggcctatgaggtaaaggcacttggccaccaagctcgatgacctgagtttgatccccagaatgcatgtggtagaaggaaaaactgacagacacctacaagttgtcctctcacttccacaagtatgccatggcatgttcatagaacatatacacatacatataaaacaaataaaactctgaaatatagctgaggatcgtttctgtgacatagttgttgaggatttacctctgattttggcctcattgataaatagtgtaaacatcttagaaaacaaacagtagtctttaaagtatctaacagtataagtccttggcttgtcattgtagttaaagacatttgtttactttcccctagtgctaattgtaggtgcctcatgggagtatactataaatgataacatttctctctgaaagaagccattctgagtttagtatgtaagtgctaacctacaggtctctgtactgtaatattcttgactagaatattgctttcaatataagaatcttaaaaatatgagtcctattttagatcacttctccctaatatcatacacaagcttggtttataaatcatattgtatggaagtatgaagagtatattggggtcatttgctagcagtatgggaaggacggttttccttgctgggactaagaaccgctcatacacagggtattgttaataggcagtaggaagtaggcacagtgctgcatgactttagaatattagctttgcatggggattccttggtagctagtttattactttatatcagaaagctagtgtttttttctaatttaaaagttaaatggggccgggagtggtggcgcacgcctttaatcccagcacttgagaggcagatgcaggcggatttctgagttcgaggccagcctggtctacaaagtgagttccaggacagccagggctatacagagaaaccctgtctcgaaaaaccaatcaatcaatcaatcaatcaatcaataaataaataacacacaactggggacccccaaaccaaaaaacaacaaaagttaaacagggacagagagatggctcaacagttaaaggtacttgccatcaagcctaatgattgagtttcgtcttagagactaatgtggaagaggagaacttacatctcctagttgtcctctgatccctataagcacatatacaccacacacaaataaaataagatttaattttaaagtttacattaaataaagtgtaatttaaaaagagaattaaggctgggcagtggtggcacatgcctttgatctcagcacttgggaggcagaggcaggcggatttctgagttcaaggccagcctggtctacagagtgagttccaagacagccagggctacacagagaaaccctgtctcgaaaaacaaaaagaaagagagagagagagagagagggagagagagagagagagagagtgttaaatggccaaatgctcattgcatataggttgttagggaatttgagaggttggccttcatgcttcctttttgttttgtattgagaagtgggacacgtgtcccacattaagaactgtttcacccttggtgacacgattagagcctctttagtttatgttgaagattcctgactttggctgtgtggacacacatgagcacatgtgctagtacacatgcactcacacacacagtcttactggaaagttaccaagtaaagggttttttgtttttgtttttgtttttgtttttcgagacagggtttctctgtgtagccctggctgtcctggaactcactttgtagaccaggctggcctcgaactcagaaatcctcctgcctctgcctcccaagtggtgggattaaaggcgtgcagccaccactgcctggccaccaagtacagtttttataaaggaaacggaggaggtgaggaatgagaaccaataatgaaaatttacacttatattaaatttagaattcttttccaggtatttataaattggcagggaattaaaggaattttgagttgattagggtgtggagacaagtgtgtggtaaataaaggaggatttgtgggttaagtatcatggtttacaaggtttggcaaggatcagattctaaaggtattaatgtgctatgctaatgcttttggatttagtcctgaacattttagggagccagtgatgattttaggctttccagttacatgatcatgattagattttagggagatccccagcagcactgtgaagcaaggagataatgtaggagattctgataacgtctccctaaaagacagagttggatgtagtagtacaccctgcaatcccaacacttaggctaagtaagacaaaaggttccagaatttgagccagccttggttacatagcaattctaggccactctgggatgcatagtaaaacataaagaacaaaaaagtatacttatcaggtaataacacccccaaaagacatgtaggtctataaattacaaatatgtagagttaaatctgtaggaattggtagaaacagggaatgatggaacaaagaaaaatttaagattgtattatatttatggtttagagtattatatggagcatagatttgaaaatagacttgaatggttagttataaataagttcagataccgactttattctatagtatttagtttgtatcagtgcaccagattgctatgtgtcaaagacttacagcaaacacagtatagaggaaagataaatttttctttcactaatggtcaccttctgggccagctatgagaaatacgtaataatacgatggtggtgtgtcctttagcaaaaacaccccttgccccccccccaaagagcaattagaaacagtatagatgtatagatttgttagtgaagtacgtacttagaagattatttgaacagagtcccaaagaaggtgattttagagggtttaagaagaagacaaacactgagggtacgaaggcagtcctgattaaggaaactggaagactggacccacagaggtggtatgggagaactgatgactcttgaagggaggtggatggctgtcaccatgggatatgggaacaacctggggatcagatccaggctctgctctctttttaggaatgaaaattccattttcagtacagagttcttcatgttaaggcattcttgtaacatcctatacttgttttttgtctcatagcacctaacatcactaagttcatgccttagtacagtgcttaacagaaaatattagttggatgaaggaataacatttgcactcacttagaaggttcatatgtactgcatatgggtgtgaatgcagcactgtttagtgtagagctgtattaagagtctgtgtgtgtgtgcgcgcgtgtacttaattatttttaaacatcgtttggggataggcttgtgctcagtatgttcttgatagcacaggtacctcactattgctaggacactggatagcagcagtgctggataacttcaataaaattgagtgctttagatgagcactagcaatggatgttttggaggtgaacagctgtcagagctattaaatttctttacatatcttggcttaatgactaaggttatactcctttatcatagtatctgtatataatcttcataattcctcagctaaaacctattccaataaagtaagcattgtaatcagaggaaaacaagtttaactgttaatcctggagagattgccgagtggttaagagcactaactgcttttccagaagacccggggtcaattcctataccatctggcagctcgcagctgtctgtaactctggttccaggggaatcagatgcccacttttggcctctgagagcactgcatacatgtgatacacagacacatatgtaggcaaaatatatacataaaataaaataaaataaataaatcttttaaaaacttgtttaaatgttgtatcttggatcagatccttaatcagaaaaaaaaaaaaaaaaaaaaaaaaagcttaagtggttaatccagataatgactcgttcaggtcagtgccttagaaatagagtgtggcttctgaaaactactaatagattggggacctcctatagtgtctctttattttttaatacatttttaattattctgatatgtatgtgattacatgtacaaaaactaagctgagcatggaggcacatcagtataatcacagtacttgggaggcagaaagcagagatttgggagtttggggcaagtccagactattaagacctatttcaaaaatggcagcaataatcacaaaacataagcacagcaaacttgctaggtaagaaagatgtagtgatcaagaactaattagtagaattcacaatttcagaaaagttgaaaaaattgtaatataaatagaacctaatggtattataaaacttattcccagttcaaatacctcaatcccatttctataagatgtctggttttatttttttgcttcttgtttagttctcataattaatgccatagctccagagaatcttataattctaggcctcagtttataaatttcagacattgtttattgttaattgataaagacaagattaatttgatgtcagctgctttggctttgtattgtgtttattagtgaaacatctagactagtcaagtgcaatagtgaggaaggaataagagaacaaagttgacccttgtgacccatgtgagtagttgatgcagtaacccaccctcacaccagcttctgtcaggtactttagtgacttccataacactttcaggttcagtttcttcttttggctttagacatgttgactcctactatctgatggaattctcagttctattactttctactttaaaaaaaaaattggtttttaaggcagggtttctctgtgtagcgctggctgtcctagaactcactccataaacctggccttgatctcacagagataggttctactgccttttgactgctggggtcacaggtgtgtgccaccattggcttttccgttttattacgattttctactgattttaggtctctatataacttttactataatttaatttctttatgccttttcctgaaaaatattaaatagggctagtgtgtgtatatatagtatgtgtatgtattatatattggtttggagttgattaatggtcatttaaggaactggctttaagatggatgcttaaggcagatgtgtgggaaaagattattagtgtatactgccccaatcccttttctccctctagattttcttaccctttaatttcagaatatatctgctgtccttgagaatgtattttctaggttctgacaaaatgaataggccatctctcctacctagctcatgtgcctcagccctgagagtttattttctaatttgctttcttgacttatttctgtggtcatgtaataattgcatatggtatacctaacttattttaactggtttcttaaagctatttgcattatgaatagtgttgtgaatactttatctttgctggtaatggatactttctctccccctacagataataaagacttctgagctaatgtattcatttttgtggtttaacttcttaataaagcaaagcatgttgagttggtaatataattcatttagtagagtgcttggctttcatgcatgagacctcatgttcccaggatccagaatcagataaacaaggcattggtcacacatgcttgcaatcccagcactcaggaggtggagttaggatgatcagaaattcaaggccatccttgactatatagtgactttcagaatagcctgagatatatggacttctgtctcaaaataaaatgaaacattaaaaacaaagaaaatgattttattctatttttttgctattaatcatcactaaactataactttttcttctttattagtgaacacttgtcctgctctttcacctttttcttgcatggagacagcaatgtttgtaccagtgtggaaattaaccaacatcaacctgtataccttctcagtgaagagcatgtcacccttgctcaacagtctaatagcccatttcaaggtagattattttattgccataggcatttgatttcttattctcatttcagtattggagattaaaactttcatgttagcaactatattagtaagacaacaaaattagtaccattagtgaaattatttaaaattcgtatgaatgggaattttcacatttctgtgttttctcctgatagcatattacattatggatatgttagtcatttcaaggctttgtgtgtaagctgtgtttagcatagctacccaggggaacttttaatgtcatttatatcatgaattgttgacctcaagagaagttgttttataaggttgctgattgctttttaagtactggaagtatcttctttaattttaaatgtagtgtgtgttttaaaatttatgtggcagtacttcataaatatttagatttatttatctacattttcttcaagttgcttagagtcagaataaattgaataataggtaaatattcccagttcattttgaaatatgattatattttgattttgtggtaggcatattttaagcaattttcaaaatcttagcgttatattttatattaaaatgtataataaatttactttcttggagtgatgataatagatttccttttttattagtcttacatcattataacactgtttatgattttatttgctgtaaatctttacttactggatatctgctttggtttctagttatcttaagtccatttggactaaatggcactctcacgggacaggctttcaagatgtctgattcagctacgaaaaaattaattggtgaatggaaacagttctatcctatttcatgtggtttgaaggagatgtctgaggagaaacaggacgatatggattgggaagacgattctttggctgcggtggaagttcttgttggtatggattctgatactagtctgaagggggtcctgtgtgtttagattttactaaataacaaaccgctctcttggcattcagtaccaaacagttatttcttgcttatttcctctgcacatcacacaagggctacagcttggctgtgatgactgtctgcatgttcttcctgtacagtccaggttaagaagcacctagggtctgggacacagtgttcctaggaaaacaagggaatgacagggatcacgcctgatgatgaaagtgcattaaagtttctgctgagatgaaaatgagctaaaggaatggtacatttgctcccagtgaattagacaagactggttacctgtccaagccagagttactgggacagaggaacatgctttgttgtccacatgttatagaagggaacaagattaattgtgaaacagttattatttgggggctagaaaaattgacagcctgtattatgtatagtgcttgaatatttaataaaactttcagtaacagaaaatattcctaaataacttctggcattggtgtgttctccataagtcagttctttccagattagcttcagttcatatgtcatgttccaggtgcagccaggaaggagatctgcttctgagtatattaattacatagcagagacaagaagaaaagaggctgcaccgatccctctgagcataattcacttgttaagatgtggcatacagtcaagcctgatagtgtataaagacatggaaggcatggacaatgtataattcagcagataattggaattagtatctgtgatactgtagttaaagcaatctaatacaaatgtctcatgtaagggttaccctatgggagttttggagtttttattagggtttgccctgtaacccaggttggccttggactcaacactcaacctgttcaacctcctgagtcctggggttgcagatgtatatcactatgcatggcttttttaaaagttgaaactgttctcattcattttcagtaaattcatgatctattattggaatagttatgacagaaacagtacagatgattactagactttaaagacaagatggtccatgatcttaagtgtccacattacctttattatgtttataaattaaaatttataatacagtgcacattgatcaactgtacatacatagatttttaaaactcatcattacagtagaaaatctatagcttattgaattaaagtacttaatatacaagtctgaggatgtgatttttggatttcaaaatctgcatggaacccaaatacagtattgtatttatctaattccagcactcctatggcaggatgggaggctgagataggagtagacctgcaagctcacagactagttagttagcatggcatatacagtagcctggagaacttgtcctaaactaggtggaaagtgtacactgacacctgagtttatcctctgcaccatagcacgtgtatagctatgctcagagacggatacaatgatatttttatttacataaatataacattagggtaatttttactgcagtgctttttaatgaaagtaattcaatttctgccacagtggtagctgatttgtgtttttttcccttgtttttgtccattttgttttcagcgggtgtccgaatgatctacccagcatgctttgtgctagtccctcagtcagacattcctgctcctagctctgtgggagcttctcactgttcagcttcttgcttgggtatccatcaagtgcctgcttccacaagagatcctgctatgtcttcagttactctcactccacctacatctcctgaggaagtccaaacaggtattaattacactagctgcttcatcaatcagctctggctacaaatctgttcttttgagtacatcagcacttagcaatttttattttgaaattgttaaaatttactagaaaactgaaagtataatgtaaaaaactcatctaaatttatacttaacttttcatgttctgtgtatgtatccattgtcttctctgaactgttagagaaaaagctgcagacttggcaccttatgattcctacatattcattgcattttcagaattaagaccattctcatacagatgtacataatacaaatacatgtgcactcccacacacattttgtgtatatgtgtttgcccatgatgctggtaattaaacccaggaccttatatatctcttattcaagataccttgtatatctttgctctctgcatttaaagaaaaaaaaattttgacctcagaatgtcactagaattacaaaatagagcaaagattcgaggagttaacaaaaactccaacttgttactttcagtttgtttttacctttctatagcctctggttttgtgtttgttttcagttgatcctcagtccgcacagaagtgggtcaaattttcttcagtatccgatggcttcagcactgacagtactagccatcatggtgggaaaatacccagaaaattagcaaatcatgtggtggatagagtctggcaagaatgtaatatgaacagattacagaacaagtatgtatctttatttctatttgcccatctatctacccacccacccacctatccatccatcggtctatttgtctatctttcactgtgtaactttggctatcctggcactcagtatatagccgaggctggtctatcaaattcacaaatgcttgtcctcccaagtgctgagattaaacggatgtaccaccatgttcagttgtatatttattttgatatttaaaacttgcatgctgcttaatagtatggaataaaaacagaaaaattaaattttaaaaattaaagattaagctgggtggtagtggcacatgcatttaatcccagcaatcaggcagcagagacagaggcattctcatcttctttgtgtttgatgccagcctggtttacaaactgagtccaggacagccagggctacacagaaaccctgtcttgaagaaaaaccaaaaaataaaaataaataaataaataaaacttaaagctgaaattcagttttaatagaaatatactaaggaatttgtaactcacacttcacttcaggaggaagtattctgctacatccagcggcctgtgtgaggaagagactgccgataaaataggatgctgggactttgttgaagccacacaaagaacaagctgcagttgtttgaggtaagtttatttctaattggtgatgcttatatgtatgcatataataataataatatttgttttgggtattatgcaaatatgttaggatttttttccccaaggagaaaattgagaaaagatagccaacaatttcaagctgattagagaagtacagagaatttatggcttatttttttctttatttttttcagatgtgggctatgtatcaactatagatatacttttggtggttgttttgaggctcttaactactgctctggctgactttgaacttgagattttcttgtcttagcatctagagtactaggatcacagttctggccaccatccttgggtcatacatctctggaggaacacattccttacttgcgttatgtctgagaaatcttccctgggatttttatagaagaaataattttcataatttttaaaatagtaaatacattgttgagtttcgtgtagcaggttgttgttcttgggcaactatcagtgagttactaaaataagatcaagaattactgatcttacaggagacttgaccaaaatatcagctttctaattaactgcatttctgaaggtttggtagcagaatggtttgacttgggattctttgggcaattgaactgatttcatattttgagaccttttgataaaatttgattgtaaggcttttgtcaagtttattactttttggcgtattaaaggtagattatatgcttttaccaccacataataatagtggctttggtatctgttactgtactttgtgattggatatgtacctatccctgttttcccatgaaaatcatctaaaggaatggagtccctccaagttgtggccaaggttgtaggtttttttgtttttgttttggcttttatacattaactgggtttacttgaatatattgacagactcttaagtgttgtggtatgtttctatgtagatttaagtttttacttagtttttttggggggttgagccatctaatttttgaaaggcaacactgttgaaaacttgtatctgttggtagattagaataagtatatgatacattaactaatatttaacagattaaactagttaactacaattgttcttgaacataatttaagaacagaattgacaacttttgtttacttggttaaatgtagttcactccctgttttgttgtatggcctatgagctgaaaatgaaagggcctaacttggtggcacaggcctttaatcccaggggaggcagaggcaggcaggtctacaaagcaagttgcaggatagcaagggctgttatacagagaaactttgtcttgaaaaaaacaactgaaaaaaagaaacaagtatttcattaagtttatggtgttttatctgtgtgtatgcacatcttgtgcctgtattggtctgggaggtgaaaggagtatgtaggatcctctgggactagagtcagagacacctgtgaggcactgtgttggtgtggggatcaaacctgggttctctagaagagcaacccccgcttataaccagtgaagtattgttctagcttttggattttttagagagtttgaaaaagttaaaaaaagtattttgtgatacatgagttatgacatgcaaattttagtgtatataaataaaaatttattggaacatatccatatctcattttcatactgtctgtgatgcattcacttggcaatggcagacagaattgactagttatgtatcactgtatgtgggtatacattttgggaaattctggatccttaggcaatgagaccactggggtgtgcgtgcgtgcgtgtgtgtgtgtgtgtgtgtgtgatgtgatgtgatgtgttgtgtgtgtgtgtgtttgtatacacacgaacagctgcaactcttactgtctagtctcatagaaaagaggtttctttgtctatgtagagatttttattgggcagcttttttcgtttataatgtgcttttgttttagttctcttgaaataatggatttcagtaattttatttgaagtgattttagaggaagacgctaaggaatgacattaacatttcaattcttggccttaagacaaaagtttgctcttcgaaagttacttactttcacattttaaagaaattcctcctaggtttatagagattttcatatactaaattagtaaatgtgattttccatgtatttctatagtttagtgtattatgatatatatgtatgtgatttattcctcatagattagaaagccagtattatttctgggatattttatatttgttgtgctggtggattggtggattggcacacacacatctattgatatttaatttaggacaacagctttcctagactcagaatgcatgaatgaacaagcctcttgctgaaacctatactctagtggaagtgataatttgcttacaaaaattcagttctctttctaaaaaatttaagagtgatatgtacaagtcagaaaataggataatgtgacttttaaactcttgtgacttgaatttactcatttcatactc

SEQ ID NO: 1061 - DNA, 32306 bp, Rattus norvegicus
  source 1..32306: mol_type = genomic DNA
ctctctggtcggaggcggcggtaatggcggatggtgggttgtggcgccggcggcggctgctgtgagggacgatgagttcctccttcgtgtcgaacggggccagcctggaagattgtcactgtaacctcttctgcctggtgagtgcgggggccgcgggcgatgggggagggggccgcgccgtgcgcccttgggccgtgggggagggggtccgggtcgcatccagatgccggtgtccccgggctaggccccgccgccggagtcggccttctccgaggctctgcggccgcccccgggagacagcgtccgctcacccaccggccagggctctgctaggaagagtcttgcctttttttttttttttttctttaaagtctttcccctcctcctgtcttgttttggagtctttttctccatcgtagtcttgtccttaacttgggttcttatctggccggatagtaatattttcttatgtgcttcttgcttgccccccctccaccccccgccccttgtatggaacagcgtatcccttttccacactttccaggattgcccctgcctgcttcactgcctttacgcccttcccttgtaagtgggcttctcttaaacaggaccccccaaaacttatgtattaaaaccctcttcgttttataagttaaactaacacaggggtagtttccttatgggtgacttcagatctttgtgtaaaaacagtgtttgccagttcatatgttttctttttaaactttgaaaacattttgccattttgacaatttctagccatcttgcttttattagaacattatgtttttgtgagagtggaggggctagtggaggaggtactgtggtttcgcactaaacgttctatatttgtcagttttgcttacgttttaagaatgttttgagctggctgttccttttattgaactgaaaagtgtggggaagctggaattagggatgttctagtatgtatatgtaggtcggcccaaatcggataacacccaatagttaagactttttgtcaaaagtaccaactgttgcaaatatctagtcctgaattaaacgatatccgagcttcgtgaatgactttaagttggagtgactttttcatttttcttgtgctgtgggaaatattaagtctatcataggtaagtgaattaagtgggtggagcataactagttggcaagcgtaaactgccagtcatgtatcagcagtttcatttttggcaccgtatgctttctgtcaccaagttagagtaaagaattatgaatttcctttgttgaatctctttcacgatatggtaaatggggatctttaacgtacttctgccttacagattagactggttttctcgacagtgtccattaatcagcatctcatcacatgtagtaagatgtacagcaggtttaacgtttctgtcttccccaactggatctatttttggcacttcggtttttttgaagatagattagcacaaatctgacagctccttggaagtagttcttttcctgaagatgtgtgctcgtggggaattagcaggctttttttttcttttcagaaaaacattcagagtcttttcattagagccatgacgtcttacgacgttgcaatgagggcctttacttttcagttcaccagggagcgactgtgactgacggctagagaggaatgtaggctagagacgacagacaggcttaccatcattgtttccttggtcggcttccgatatgctgtgtttattacagactggctactcacgggcatctttgatattttatttaacagttttgtattcttttccttcagttcttgttggttgaaacattaaaattggccatggtgttttgtttgtttgtttgtttgtttgtttttttaattttgtcaactttcagttcttaagcatgaattgaaaatagtgattttaatgaatcaaagactttatagtgaatatatatttatatataaatatgtagtaacataatatattatatttaataatcgatattgtttatttgagtgaatatacaataatatagatattatgctttcttttccttcaggccgacctgacaggaattaagtggaaaagatatgtatggcaaggcccaacttctgcccctattctgtttccggtgacagaagaagaccccattttgagcagttttagtcgatgccttaaggcagatgtactcggtgtttggcggcgagatcaaagacctggaagaagagaattgtggatattttggtggggtaaagatcccaattttgctgaccttattcaccatgacttatcaggtgaaagcaatttatcctttttcaatgtgccttagcaacgttgtatactttccccaatgtgcatatgctgtggtgggctgtcttgtcagtgggaagctataagagcagttgccatgctctgtttaaccatccttgttttagtttcctcaagttagccatgtagattacagcccagctcccttctgtagtttctcacagacagtttgtatctagggaaagcattttcattaacctgagaaaaatggaatctggaagcatggtgtttttcatagttatataatagttttgaagtcaagtgtaactcacctttgagtctattttgctatgttctttttgtctaaccctgtgggcgggtctagaaatgtaactttggcatatattttcaaaagtatagttttattttaatattatttaggattatgtgttaacccagggaggtatatgctgttttttggggggtggatgggagtgtcttttagatactgcttcatcaaagaataaattactaaagacagtgccatctttataacttaaaggacaaaggtcagtctgaaagtttgcacagaaatagtttattacaagcacatcaatattacttcctttttattttcttgacttttagggccaaatgtacttgagaaagcaactatagcccttgatgaaaattactggttatgtttattttaaactcagtataagtgtattttttattgatataaaataaacttggaggaaccaagttctagtttgataggatttttcacagttaaattgaatttctttttttaaggtctttaaagttttctgtgtgaagagggagagcaggtgtggatatgtgtgtgccactgtcgtgtggggtcagaggacaaccttcttagagttctgtttcctccatcgtgttgagacaaggtttctctgattgtttttgctgttctgaagcatatcgtaggctacctggccctctttgtttctgactgcttcctatctctgctccccatcttagtgtggggtgctggagtcacagatgcaggacatctggtttttttatatgggttctggaaatggaactgagactggctagtttttaccctattctcctgatcttgggtcatttgaaaaaaaacctttcttgtacgatagttatctgtggtttatgattttgaactatagaatcttttattttatataaaatataatccagaagtcatgtagccttatataaatatcttgtctactcatagggtttagtcttcttgataatgttggcacagcttctgaatgcacttttgtagttgagactgagtcttgctgtgttgccttgaattcaaagccctccctgaagcccagtctcagagctggcattacaggtgtgtgctgccctgcacagccttgaacaaacctttccatggagtgcattctgtgtaatcagagataactctaatacatagtgtttagttttaccatagtgataggaatgttttgaaggttaaaagtctattaaagggggttggggacttagctcagtggcagagcgcttgcctagcaagtgcaaggccctgggttcggtccccagctccaaagaaaaggaagaagaaaaaaaagtctattaaaatagaatatgaactgtttattaacaatgtatgttgttaaaacactttgtatagctatttttcttctggattttaggtcatcagaagtatgttctcaagcaaagcttggttagagtttaaagtcttcttctcctttagcatcattttaaaatgacatcacctcactctaatacagatactgatcttgaatatgataatttttggatatcagatttttactgctgccagattctgctaagtgctattgaataactaaacatttttatcaaagtggaagtgaccaaaagagtaaatgtaaacacaaacacagttgagtagcttgtgactactgtttcaaagccagccctgaactcttggtttataaagtcagtggtatttatataatgttttcgcttctttttttttttttttttcttttttttggttctttttttcggagctggggaccgaacccagggccttgcgcttcctaggtaagcgctctaccactgagctaaatccccagccccgttttcgcttctttttaacctgtcatttactttagaaggttactgaaatcagactatcttaaagaataataaggtcttttcagagggagtatatttatcttgccctttttttttttttttttttgctccagggacaccgtctgcctcccttttggggtaattagtgtgtctctgtgctctagctaacccctttttcatttcttcccatctgtggcactccgttcccttcttttaagctcccttgagaagagagcagctggacagtaggggtggcatcagctgcatgaggcatcctgagctccaagtggaggtgtagcagtgaggaaagaggaccaggaaggacccaggtggtaactaagaggctagttaatttggcttgagcccactcttctcaggcagtgtccctctatttggttcaacacctactacttcttgttactgacatgtttgtgattatggtaatattgtcctctttattggggatagaagtataaggaaggcattcatttttttaaagattagatttctctgttttttgtttttttcactgatgtgttcaataaccaaaccacagagtagccactttatctactctgtctcatttacatctgtttttaagagtaattttctttgaggtaattttagatatacataaaacttggcagggtagtgtggagagtgcctatgcatctctcacttaactttctttattcttaatagctgtatcagaatgatggagttttaaaaactcataaatcaatattgttatgatattaaaatatttatttacttcacttggatttattttacctagttctgttgtttttaggatctggtctaggctgccaaatgacatttacctgctctctcatttttttgcttttctaggcattgacagtttctcggggaacctccctgcttcctttttatgattttgacagttctaagagtctagagtctagtcaggtttcgtagtgcatgttaaatttaaccttttcttctgccttataccatttagcacatgtctgagttaccattaagtttagctaatgtatagccagaaaacataaaccgagtaaattgtattccacactttgaatttttccttattttgtatcagtagtacttgatgctgtcttgcaaagtaatttgagaaggcctgatgatttttggataaggatttgtgctcattcgtattagcttaagtatagcattccagaaagacatttgtttaaaaagaaaaatcccttgaatttaaaagctaatatacgagtttttattgtatttctaggataatggacagttgaatccatgttggtttattttggtagaaaaagaattagagaagaattttctggttacaggttttcgagttgtttagtagttgtgtgataatgaatgacagagatgtgaagttggtgatgggaaatcttagctcactggttcctgtcaggtctccaatgggcatgattgattggctcctttacatgtactgttagtttgctgttttaaaaagcaagattgtataatttcatttggtgtgtctttgaacatttctgtgcctttttattctgtatcctaagagtttgaaattttattgcagccattgtttttttattcttaaaaacaaaacaattccctctcccaagattgttttcttaaaaaaatcataaggtagattatgatgagactggatttctcaaggaaaaaatatgctgaatcaaggctaaaaatacttgttctttttttgtggttttggaggtctctatataggagtttaacaacatatccagatactttcgttatagtagagtttcataatgcatgctgcctaactgggtcattattccagatttaattttggatgcttttatcagaggacattaattatagtggactttaaccttaacgggcagcgtttagcagagttgatagacacaaaggcagcaagctaagatgtgctgaagagttacttctatctttgttttaaaattcttaaactgtgtcccatttccttggctagtcttaggggtggtgactgtgtgtgtgctctgtagtatctttttttgagcaagaaagtgttaacatttagattgtcatgtcagatataacaatcacctcactaagctgttttaaataaattttcaagttcttttggccctgagtgaatgatgtgatagcttaaggcagttagtgatatttgttgatttaatgagttatgaatgagaaataattattaagaaaaacactgattttgacatgttgatttttttttcaagaaatctgtactattttctaacatgctaatttttgtgtcattccttattcattggcatatgttgcatcttagttgtttagcaaaattatagggaaaagatgcctttttaaaaatcggctgatcaccatggagatatttaaagaggtcatttttttttaggaaaatattgaatatggttgtgtcaactcttttgcttttgatactgatttctttttctaatcataattattttgatgacctatgacacatcctttggcactcctataatctgtgttctttagcatttgaacttttgtgttgcactctacaaataatttgcaaaattttttgagtaacactgatggttaagagttttaataccaatagtaatggaaaagtactaaaaacagaatggaaacgtgttttctctggggattaaagatacaagaggaggaaaacatttatttatttaagtgcattaagcagactttttcccattagcctctggttaaggtctaaagtgcctgttaaagcttccatgtgttctctccccctttctctccttgttacagtgctggtgttgatattcaaggatcttttaattaaagagaagagatacatagtacttgtcttaggtagatggttctgccattcactgtttatatctgtgagtacagtatgtagaaagtacttcttgttcttacaacagcagggtattagaaacttgattcagtatacactttttgtttttaggtgacactcttcccaaaacagaacccaaatttctttagactttttattgggtattttattaggagttaatatttcattagccatgaaaaatgaaaatggaatagttcttggtcacttccaatagtagtgtaaatagttgcacttaccatgtagatggaaggtgtattttagagattttttttttttttgccttaggtgttcctgtttgtactaatgagaattatgagcttttggaacaagaagagcattctgttcttctgaaagtattaagttcatattaaatttctctagataaaagttaaagcaatgagacaagtccttgagaattaatgcttctttcacaaaaaaatgtatgtgcatacattgtgtgtgtgtgtgtgtgtgtgtgtgtgtgtgtgtgtgtgtgtgtgtgtaggaggagagacatgtgcactgaatacatgtggaagtcagaagacaactttgtgcaattatttctctttctagtctcatacattctgaggatcaaactcaggtcatcaggcttggcagcacacactttacccactgaactatcttgctggccttggttatccaaaccacatttggtattcttagcttaaatttagttgaaatagattttttaaaataaaatcatagtttttaggacatgtaaaaaatgtataaacaattgtaacttttgcttttctaaagatttttgtttttaaacacaaagcaatttgtaatttgctaaacagtctttttgtaaaaatataaactacatttatgtatttattttgttactgtgtatgtctggctatacacatacagtgcacacatgtggagttcagagaacatctgtgggcatctgttcttgccttctaccaaatggatcctgggactcaaacccaggtcgctaggcttgctgagctattattggttcaaaacagtcttttagtgaattggaactttgtacttaatactcctgttttaaactgtagtaaacagttaaagaggtaaattatttgtaaattttaaacgaatttatttgaattaatctaaaataattaatttaaatgaataataacttgtagcttagatatgtatagaagtaactgtatcttatgtcttcttaaaacttggcaatagttaagcagtctattttgataatggctacttctataatgcaaatgttagaaccattgtgttgttgagaagatagggagttttgaaggtaataaaggacattgaactggtggagaactgggagcagttcctgtcatatttcttttggaattatgaacacatgtatttctattgtcatgtaatttgagatacaagttttaatgaagctatttgactttgaaatcagaggtccttgctaagctaaaagatggattcttttttctcttagcagctcacacatatgcttgtgatctagaccttaaataagtggagtcactgtgcgcccactccttttctctcagaatatctttataataagatgagacccataagcattttagttttaagtgaagtagataaggatctctaacatactgaatgtgaaattttcctacttaaaattactttattctagcctgcgagtattaccattttcctttgtttttctatagaggaacaatcttagttactttgaaaggcctgacagtgatttaggaaagaacacttgaaagaacaacataaaatcagcattaacctttgtagtggcagtttccagtgcagttaaagtccactgtcattatggtttttagttaatgtttactctgatcatttgttgtaatacattctgaatataaaccgaatgtcacttttaatacatctctgtttttattcaaaagctcatagtaaatgttatttttctaggttcagcatgtaagtttgtgaagtgagaaatatttgtccttttgttttatttgaaaattaaatgagagcaagacgtagtggcataggtctgtaacctcaacacttgagaggcttgagaggctgagacagaaagatcatgagttcaaggctagcctcacagagcaaactcctgtctcaagaaaaaaagatgatggtacataattaaaaaatgtttatggctgggagtggtagctcatatacatacaatcccagtactaagtattgggatcctgagacaagaggattgctgagagttcaaggccagcctggtctacatagttggcttcaggacaactgggttaaaaagaaagacaaaggaaaggtcatataaagatatagtatagaaaattcttaattatatttgggctaacaaaataatatgtaaattgctaaagtggtatctatcattttttgttacctttattgaatgtttcattatagatgaaagagtgaattttgttctctgaactgtgtccagacttaccagtgattgatttctgtcccctacccactacccctgaaacttagagtgactaatagatttgaggctatgtagttagtgaagagcaatacttcttatgactgatgtcatttaaaatatgtttatatttcctcctttactgaatactcatgtgaatcactgaaatgagatctatttgataattaacacatcgtggcagcagcttcctttatactcgtcactgagttttgtagttgagtcatagattagaatgctgatggtcatgaaatgttttgagtttaattattaactggctccgctgtctgcccctcccccacctcaggttaaatgattagaggaattaggacaaagtgagcagtttagaaacaggcatcatatggtatgtttagtattttctatgttatacaagaaaataccctttttcaaaatacagaaaacaagtctttatgtttatgataccattgctatcttttatattgtggaatatagtttttgggcagttttgtagagctcttagacattgtctgtcttgtaggatatctttgaaacctggtactttgatgtttaaagatgtgttaaagaacacctagtggtgcatatttgttatcctcacactcaggagatagaggccaggttccctgtcaaggaccagaccagccttggctacatactaagttccatcccatccaggtctaaatagtgagactctaaaacaaacaaacaaacagccccccccttcagttgaagagatcgaaaggttgcagatctgtattctgaggtaaaggagagagctatggatacagacatcggtctgccacatattgagttctgtctgagaagatgtagtctcactaacttactttgtacttgattttttctttagaagaggaagatggagtatgggagaatggcctttcctatgaatgccgtactttgcttttcaaagcagttcacaatctgttagaacgatgtttaatgaaccgaaactttgtacgaattggcaagtggtttgtgaagccatatgagaaagatgaaaaacctataaataaaaggtaagctatcctattttcctcttttgatagttgtttgctagttttatgagatgtatataataaagagttaatatattttacagacatattcagaagttaatgttggcaaaatactacaagtatttaatttttataattactttcctctccctttctacattttgagaattttattgcaatgggaatgagctacatgttgttgtaaaaatataaaaaatatacatatactttttatttttggttgttgtttgagcagtgtctctctgtgtggacctgcctggcttggaacttgatttgcagaatagactgaccttgaactcctgattgatgtctgatagggctgactcatttaatttttaaagatttatttttgttttacatgtatgtttatgcgttttacatgaatatctccaatgcttgtgtagcatgtgagtgcctgatgtgtgaggaggccggaagagggttttggatcttttggaactagagtcacagatgattgtgcgctgccacatgggaggtgggagtggaacccaggttccctgtaagagcagccagcgttcttaacttctgagccatcttcagcccctaaattctccaatctaaagttgtttaaagtaaattggtgttcttctgcataagatgtgtttaattttaggggatttaattttcttgagctctggattagatttatgacacaaaaaagtaggaaagttgcagatggaggtacatagatctttagggcaagctttatttttgagataagatcttactaaatggtatagccttaggtatcctggagctcactgtgtatactaggctgatctcttactcacagagactcacctgcctttgcctcccaagtgctgggattaaaggtgtgtgccatcactgcctgaccagattttatttttaatgggaaaatatgtttttaattttttgagatagttatatatttttttcttttcctttctccctctattccctccctaccccttattctctcttgctctcatttacatttatggactctttctttagttgttggtgtgtgtgtgtaaactctgggcatggtgtggagcaggtctaaaaccacagcactcactgtgggaggtggtgctgggagggtccctggcacttgctggcagccagcccagctctaggttctgtttcaggaggctaagatggagagtggtagagtaagacattctccatgatctctttgctgcttctgtaccacacacgcgcgcgtacacacgcacactgtctgcctctgtccatattgtctgtcttgtctctctgtctccctatcctttttgtggtaatagggatcaaatacatgccaagcaagtgctctccccactgagttgtatttctagcatttagttgtatttttattttgaggctacctttctgagttgcccaagttggcttcaaacttgtaatcttcctgtgtcagactccagagtagttggaattgtggcatgcaccacatggtaagtccaggaagatatagggacgcagacatagttaatttgtctagtagtttgcagggactgaaagacaagaagtggagtcaccttatagttattgtgcattgagaataggtataaagaacccttaaatctatgagtaattaaccattcaaacaagttagtctttagataattgtataaaaaaaatctgatattttatcttaaatagttgaggggttgttctgcagttagatggattttgtgctagtcactaagtttgctagtgagattataagcaaattggatggtgtaagaaccagtgactttcgggctggagagatggctcaacaattaggagcattgactgttcttccagaggtcctgagttcaattcctagcaactacatggtggctcacaaccatctgtaatgggatctgatgtcctcttatggtgtttttgaagacagctacagtgtgctcatatacataaaataaataaataaatcttaaaagaaccagtgactttctatacttgagatgcttgatagtatatccaagtaagactctggaataagagtattattgagtttatattttggtaaacattttgtcatgttgaatctgttataaccattttgctgagtggacagttaagtttgttcatttggcaagagttttttttcttttgagccaggtctcattgtgttgtccattgattcctagtgcacttgatcttcctaccttacctttctactagttggtaatataggtaggtccctctgtactagcttaactttttttttttaattattacatttacttattaatccacaccccgtttctctgtgtgtatatttatgtttgtatgtatgtatgtgaatgatggccttcacatgctacatagcatgtctgtgaatatcttttggaagtttgttaccttctgttatgtggctcctgggaacataacttattgacatgtttgatggcaaatatctttatccacttagctaatctccccagcctcttgcttaccaagttttaaaaacttgaaggaagatgtacaggacagaaggaaattgatcttcaactcttttttgaggcaactgataatgatgtcttacagtatatactggcataggagatcttgctaagtagcagatgatattatatacagtattataaaattcgtagctcagactggcctggaataactgtgtagcctagactaatctagaatctgtggtgctcctcatgcctcagtgttcagaatggtgggtttacaggcaggatttaccacatctggctagtatttgattttaatatatactataatcttatcccatacattcagtggtagatatgtaactttttatgaaaacagtattactaattttattagtctttgacatctttattttatatattatctttagcctcaattttaaaaggcaacatattttacaaaacatacataggtgagcgtgcatatacacacatagacacgtataaatccgggataaaatggatacatggtagatataacaaaaaggagataggatcaagactggttttgtgtgtttttctgtcctgggaaagaacctgacccacaaagattaagatgttcctggtttctgttttgaggggaaggataggaatagaatatttcaagcatttgtggtaagttgtcgtaattagaatattaaaactgacatggtggcacatgtctgtctgtaatgccagtacttcagagactgaagttgcaagttcaagatcaacccagattacatagtgagtcttattgaaccacaatttccccttaactcttaaagaaagaaaaggaaaagaacattaggatgaaatattgaaaaacaaagctttttctcctcttaaagatattttgtgcctgtactgttcactgtgatagtcactagctgcttgctgctatttaaacccaatacactgaaattaagataaaaattacttctttagtttcataagctacattttaaattcttattctatataatggctgttgttttgtataataatggttcagagatggggcatcttatcattgtagaaacttctttttttttcttttcttttttttggagctggggaccgaacccagggccttgcgcttgctaggcaagcgctctaccactgagctaaatccccaaccctagaaacttcttttggatgatgttgcctttataactaacatagtttttagtgttttatgcaagcagttgatctagtgatttttttttaaaaatcaataggcaaaataatatgcttttatgctttaaagtgcaataataaaactatttactcctacatgtggcttctacattatctcctgatctctaaaattaattaaaaataaacactgtgacatataaatctctcatggaaaggaattggtagcagttaataggtttagggtgatctttgttccttggatctcttactacctctgaaaagttcaaggtcataggtattgttatgtgttgtcattattgtttgagagagtgtcatgcttatgtagtctagcttggccttgaactgagcctgtaggcatgtattactgtgtctcctttactaatatgtttcttttctttgaattttcttgggtagcgtaaagaaataaagtagacaggagccacgtgcatagtgtaaagtttctgttacactgttattacatatgtgtgtgtgtgtatgcgcccctcccccaataaaattaaagcccaagtaaggtgaaactaattttaagaatattttacttagtttggtacacttgaaatactttttagagcataaatctatctctgagatatttcctttttttttaattgtgaggcctttgagtgtgtattttatcctcagagcatatcttgatttggattggccatagtccaaatgattataattacatggtgattgtttaacaactagtttaacttgttaattaaacttaacttgttaatgttggttgcttattgtccagtaccgggtgctctctgcctggaatcaagttgtgtgtggtagagtcccaaaggtccctgtgtcaaggtatccactatctgcccagttaggcttagttatttcttcaaactgtccaccacaccctagcccagcccacccctgtagtttttctagaactgatttgctcttactgagtctgatcctgcagggtgctatgctacctgtaccccaacggattttgttatggtgcttaaatcattaggatttctatcgcttttaacattttcatcttttccaggaatattttgaggaaaattacgccctaagaatgactttttccccttttcactgattttttttcttacttctattttctactactgttcttagaattgacttcaaacaaatcttttttcatgattgtttttagatgctaatgagacttttatgaaatgaggaagtcagtaagggagcttggcctaagtaggactgataaggccctgttcatagttaagggtttactgtaaatgactgcaaatcttaaaacattcctacggtttctctagctttataggtaatgaagtgtaagcacatagcagtttctacagtgctacacaggactaagggctggagctgactgccaggacatgaaaaacagaacttgtaagccctgttaggcagacgattatattttgtacacttagatctttttaaagagtaatagtaaatagtaaaagcagagaatagcaaaaggaaagaattaaagacttcaaacttcatagagtaattgttttttaaggattttttttataatgttcagtaatatgttcactaaatgtgtagaagtaatagaatattcattcaatgatacattctttgggattttcggatagatactttgttcatggacatattaagaatgttggacattgctgattaatagtggctcgtaaagttgtctgagtatggaaatgatctggagaacatctaaagattattgataacaggactggggctgttaagtggaggacttgcctaacagcacgaagtcctcagtttagtctgtagtacctctcttgtatttgggaagtggaggcaggaggaccagaagtttatggttgattacatatgagtttgaggtcatcctatgatgtatgagctcctgtaatcagtcaatcagtcagtcagtcagtcaatcaatcaaattattgcttgtgctgagcctattacatgggctaaccttaatgtataaatttgaaagctgttagctgggcatagtggcacctgcctttctcagcccctgggaagcagaggcagaaggatctttgtgagtttgaggccagcctggtctacagagagacttcaggacagctagagctatagagtgagactgcctcaaaatcaacacaaataaatataaataaataaaaaattagaaaaataaaataaaaaataggaaactattgaattcatggaataaaagtaatctaggaatttaagataagtaggtttaaaatattataaaaacacatgtaacaaaatgtatcatttttgccctttttccggtatttcaatggtgttaaggaaattgacatggtggtacaattgacattttctgccctttggtccatggcaaacaacttttctgtttttttaataagcgttttaagtacctcatataagtgaaagcatataatatttgttattttgtatgtgacttatttcatgtggcataccttcaagttttaacaacattgtaacatgcgagaggttttttttctttaagactaaacagtaacccattgtacatttagtgtattgtgtacttgctcattggctggcatctgagtcatttctatgttttgtctatttgttgtaaacactagtgtgcaaatatttcctcaggtccctgtttttcattctgtggttacctactcagaagtgaaattgctgctttttatgacaattttaaatttaattatctgaaaaattgccatactgtttctcattgtggctatagtgttttacattttcattggcaatataagagtttcagtctcattgcacccttaacagtgcttgttatttactggttgtttgttaagtaaccatttttgttggtgtgaagtggtatcctatgtttctgatttgtagttccttaattactatggctattgagcatagtttctttttggctgcttatatgttgatctagaaaaatacccaactctgtctattttaattgttaggattatgatgttttgatttttttttgagtcaataccttgattttgtaatatatacatgtgtgtttatgtatgtgtggaatgagcagatcaatgtggagatcaaagccagggttcacatgtgctagactactgctgtacaactgggctgcatccctagctccaagggtttgatttgaaaatagctcatagcttgtggtgccacatgccttgaatctcagtacagaggcagaggtaggcagatgcctgttgaagcccagtctggtttacatagtgagttccaagacagcagggactacatagagagatcctgtttcaaaagtaaaaacaaacaaacaacaacaacaaaacaaagtcatataaccctcttcgggcctcaacttctctaccagcaaaatggaatattgttatttctatagcttcctaacacaaattctgaaaacagatcatttgcttcttagtactacacacacacaaggtgtgtgcatgtatttatggagccacacacctgttgtcctgtgatcttggtaattcggaagttgaagcagaagatctcaactttgaggccagcctacaggacaagttcagtgctaatttaagctacattaggagaccttgctctaaagcaggcaagcaagcaaacagaaaactcgttatagaagagctaaattccatgtcttgttcttttgaggtaatgtctcactgtgtacccaggctgcctcttttattcctctgcttccttttcctaagtactgggatgtccagccctagaggagctaactctttgatctggagtatgtcttcttcatcattgtcctttctcttcctcctcttcttcctccttcctttttagaaaataatcttttagggagcctatgatgtagcttagcaggtaaaggcgcttggccaccaagcttgatgacctgtgatggttctccagaacgcatgtggtagaaaggaaaaactgacagacacctacaagttgccctctgacttccactagtgtgccctggcatgatcatagaacatacatacacatacaacatgtatgaaactaacaaaactcttttaattttataatgtagttgaggaacatttctatgacacagttgttgaggatttatctctgatttttgcctcattgataaacagtgtaagcatctagaaaacaaacagtagccttcactgtcctaatagtatagtatctaacagtgtaagttccttggcttgtcgttgtagttaaagacgtttgttcacttagtgctaattgttggtgtctcaggggatgatgctataaatgataacctatctctctgaaagaagccatgctgaatttaatatataagtgctaacctgcaattctctgtactataatgttctgtgcctagaatattactttcaatgtaagaatcttaaaaatctgagtcctattttagatcacttcttcccaatatcatatacaagcttggtttgtaaatcatattgcagtatgaagagtatatagaggtcatttgctagcagtatgggtgggatggtcttccttgctgggagtaagagctgctctgtctacaaaacagggtgttgtagatagagacggacagtgctgcatgactttggaatgttagctttttacggagattccttggtggctagttttttactttataccagaaagcccaggggttttttgtttgtttttgtttttgttttctctttcttctcctaatttaaaagttaagtggggacagagagatggcttagcaggtaaaggcacttgccattaaacctaatggtttgagtttggtcctagagactaatgtggaagagtagaaattacatctcctagttgtcctctgacccctataagcacacacactacacataaatgaaattaaataaaatttaatttttaaatttacattaaataaaatgtaattaaaaaagagttaagcgactaaatgctcgttgcatataggttgttggggaatttgagagattggccttcatgcttttgttttgttttgttttgaggagcaggacgtgtggctcatgttatgaactgtttcacccttggtgacacacttagtgcctctttatgttgaaacatgatgtcactatgtttgcagagctaaaaaagtaattgtaagtttcctaatttaatatttctttttagaagtgaaacacaaagcgaaaagaagtattttggagaacttaattgtttagagaagccttagatatgaaggtatataattcagatctccaaaacaaccagccagccaaccaaattacctcctccttttcttccttcgttttttcctttcttccattctttttcaagttaaagaacctatatctgttttaggttattgcttatactttcaaatatttttggaagcattaccattttgctcgattgaagaattgctattcagtgggttgtggagatgacttagtcatcagaagtgcttgctgctcctccccattgtgtatataaaaagccaggcatgatgatgtgtgcctgccatcacagtgcaagtcacagagacgtgaggatcccctggcttgctgaccaaatagtaaactttagggtcagtgagagaatctgtttcaaaaataaggtggagagcaattgaagaagatacctgactttgacttgcgtggacacacatgagcacatttactaatttgtacttacacacatagtgttactgtggagttaccaagtacagcttttacaaaggaaaggaggggatgaatggggaccaataatgaaatttttacgcttatattaaagataaaattttttccaggtatttataaattggcagagaattaaagaaattttgagttgattaggatgtggagataagtgtatggcaaataaagggggttttggtgggttaagtatcacggcttacaaagttttgccaggatcacattctaaaggtattaaagtacaatgttaatatttttggatttagtcctgaacattttaggggtgattttaggctttccagttacgtgatcgcaattagttttcatgaagatccccagcagcactgtgaagcaagaaggtaatgcaggagctctgataattactcctaaaagacagagttggatgtggtaatcccaactcttagggggccaacgtaagacaaaatgtaccagaattcgagccaacttcggttacatagcaagtactaggccactctgggatgtatagtaaaacataaagaacaaaaagtatacccatcagataataatacccccaaaagatatgcaggtctatgcattacaaatatgtagttaaaaggaattggtaaaaacggggaatgatggagcaaagaaaaaattaagtcctgccaaggctggacccccagtgattgttggggggagggcagtaatgggggaggtggggaggggaacacccatatagaagggaagggggaggagctagggggatgttggcctggaaactgggaaagggattaacatttgcaatgtaaataagaaatacccaatttaataaagatggaagaaaaaaagaaagaaaaagatggtattatatttgtggtttagagtattatatggaggatagatttgaaaatagatttgaatggttagttataaataaattcagctaccaactttattctatagtttattctattgatagtttatatcaatgtgtcagattgctttgtgtcaaaggcttactgcagacacaatgtagaggaaagacagattcctctttcactaatggttaccttcaagaccaaaatatttacatgatggaaatgcttcctttagcaaaaacacaccttaccccaagaagagcaactagaaacagtatagattccttagtgaagtgcctacttagaagaaattatttgaacagagttccaaagaaggtgacttcagagggcttagaaaaagacaaaaactgagagtacaaaggcaggcctgtttaaagaacgctggaagactagaccgataggggtgaaatgggagggatgaatcttgaaggtaggtagatggctgtcaccatgggacatgggaacaacctgggggatgagatccagactctattctctttttaggaattaaaattccattttgagtacagagttcttcatgttaaggcattcttataacaccctatacttgctttttatcccatagtacctaacttaagttcatgccttagtacagtgccaaagtgcttaacagaaaatatttgctgaatgaatgaatagcatatgctctcatttagaagcttcatatgtactgcatatggatgtgaatgcagtactgtttaatgtagagttgtattaagtgtgtgtgtgtgtatgtgtatgtgtgtgcagttattttaaaaatttgtttggggatagatttgtgcctagtatgttcttggtaacacaggtaccttgctattgctagagcatactggacagtagaagtgctggataacttcaataaaactgagtgtttgttttaaatgagcactagcaatgaatattttggaggtgaacagctgtcagagctattacctttctttacatatcttggcttgataactaaggttatactcgtttatcatagtatctgtatataatcttcataattcttcagccaagacctattccaataaagtaagcattgtaatcagaggaaaagtaagtttaatttagctttttaaagagcactaacaacttttctagaagacctgggttcaattcctcgtaccatctggaagctctccgatgtctgtatcgctagttccaggggaatcagatgccctcttttggcctctgagggcactgcgtacatgtggtacacagacacatatgtaggcaaaatatccatatacataaaataaaaatcaataaatctttaaaaaaacttgtttaaatgttatatcttggatcagattttttttttttttttttggttctttttttcggagctggggaccgaacccagggccttgtgcttcctaggtaagcgctctaccactgagctaaatccccagccccttggatcagattcttaatgagaaaaaaagagctctagtggttaatccaaatactgattagctcagtgtcagtgctttaacaaatagagcgtggctattgaaaaatactaatagactggggggctgcgtgggcatgggaacctcctctgtggtctctttttactttctaatatggttttaattattctgacatagtagatatgttcatattagatatgaacaaaaattaagctgagcatggcagcacatcagtgtaatcacagtacttgggaggtaaaaactgagatttgggagtttgaggccagtctggactattaagacctatctcaaaaacagcaggaagaataataatcataaaacataagcacaattaacttactaggtgagaaagatgtaatgatcattaaataatgggtagcattcacaatttcagaaaaattgaaagaaattgtaatataaatagaactgaatggtattattaaaaatatttccagctcgaatacctcaaccccatttctataagaagcctggttttattttagttcttctcataattaatgctgtagcttcagagaatcttacaattctttttttttttcggagctggggactgaacccagggccttgcgcttgctaggcaaacgctctaccactgagctaaatccccaaccccgaatcttacaattcttgacctcagtttataaatttcagacattgtttattgttattgccaaagacaagattaattttatgtcagctgctttggctttgtattgtgtttattagagaaaaatctagactactcacatgcactaatgagaaaggagtaagaggagaacaaagttgaacctgtgacacgtgaatagttgatacaataacataccctcataccagctgtcaggtactttagtgacttccacaacacttgtaaggttcaacttcttttggctttagacattgttgattcctgctatctgaagaaattctcagttctattactttctacttttttttaaaatttggtttttcaagatggtttctctgtttagtcctggctctcctagaacttgctccatagaccgtgctggccttgaactcacagagatccccctgcctctgcctcccgagtgctgggatcaaagttgtttgccatcattgtcttttcctttttattactattttctacttttattaggtctctagaataacttttactataatttagttctttatgccttttcctgaaaaatattaagtaggtctagtacatgtatatattggtttggagttgattaatgatcatttaaggaaccggctttaagaccgatgcttgagacagatgtgtgggaaaagattcttagtatatactgtcccaattcctcttctcccacttgattttcttaccctttaatttaaaatatatctgctgtccttaagaatgtattttctaggtttagacaaaatgaataggctatctcttctagctcagccctgagaatttattttctaattcgctttcttgacttatttctgtgatcgtgtaataactgcatatgtggtatatctaacttattttaactggtttcttaaagctgtttgcattataaaagtgttgtgaatacttcatctttcctcatatggatcatttctctcccccacagataataaagacttctgagctaatgtattcatttctgtggtataacttcttaataaagcaaagcatgatgagttggtaatgtagttcagttagtagagtgcttggctttcatgcatgagacctcatgtttccaggatccagaatcacataaacagggcatggtggaacatgcttgtaatcccagcactcaggaggtggagttagaatgatcaggagtttaaagccatccttggctatgtagtgaatttaaggctagcctgagatatgtggatttctgtctcaaaataaattgaaatattaaaagcaaagcaaattatttttctatttttttgctattaatcatcactaaactataacttttccttctttattagtgaacacttgtcctgctctttcacctttttcttgcatggagacagcaatgtttgtaccagtgtggaaattaaccaacatcaacctgtgtaccttctcagtgaagagcatgtcacccttgctcagcagtctaatagcccatttcaaggtagattattttattgtcataggcatttgattacttattttagtgttggagattaaaactttcatgttagcaattatattagtaagacaacaaaataaataccattagtgaaattatttaaaattcatatgaatgggaattttaacatttctctgttttctcttaatagcatattacattgtggatatgttaatcatttcaaggtttcgtgtgtaagctgtgttttagcatagctacccaggggaacttttgatgtcatttataccatgaattgttgacctctagagaagttgttttataaggttgcggattgctttttaagtactggaagtatcttctttaattttaaatgtagtatatgtgtctgtgtgtgcgtgtgtgtgcgtgtgtgtgtgtgtgtgtgtgtgtatgtgcgcgcgcatgcgtgcacacgttaaaatttatgtgtcagtacttcataaatatttagacttatttatataagtacattttttttcttcaagttgcttagagtcagaataagttgaatgatatgcaggtattcctggatcgttttgaaatatgattatattttgaatttggggtagggataaatttaaactattttcaaactcttagcattgtattttatattaaaatgtatgataaatttgtttccttggagtgatcataatggatttttttattagactcacatcattataacactgtttattatgattttatttgctgtaagtctttgcttattggatttctgctttggtttctagttatcttaagtccatttggactaaatggcactctcacgggacaggctttcaagatgtctgattcagctacgaaaaaattaattggtgaatggaaacagttctatcctatttcatgtggtttgaaggagatgtctgaagaaaaacaggaagacatggattgggaagatgattctttagctgcagtagaagttcttgttggtatggattctgatattagtctgaaggggaatcctatgtattctagttagattttgctaaattacaaacagcttccttggcattcaatactgaacatttatttttcttgcttactttttctgcacataagggctgcaaggttggctgtgatggctctatgtatgttctccttgtacagtccaggttaaagaagtacccagtgtctacttggtacccagcatgttttgttctgggacacagtgttcttaggaacaacagggatcaagcctaacagtggagtccattaaagctgctgctgagatgaaaatgacctagaggaatagcacatgtgctctagggaattagtcaagactggccacctgtccaagccagagttattgggacagaggaatatactctgttgtctacgtggtaaagaaggggacaagagtaactgtgaaggagttatttgggggctagaaaagttgacagcctgtattgtgtatagtgcctgactatttagcaaaacttttagtaacaaaatattccttaataacttctgtcattggtgtgttctccctaagtcagttctttccagattagctgtagtccacatgtcatattcaaggtgcaggttagcaaagtggtctgtttctgggcatattaattatggagcagagataagaagtaaaagagaccacactaatcccacgaagcatgtttaactctgttaagatgtggcatagagtcaagcctgacaatgtgtaaatacatgggaggtatggacaatatatatatatatatataattgagcaaattactggaattagcatctttgatactgtagttaatgcaatctaatagaaatgtctcatgtaaggattaccttatgggagttttggagtttttattagtttttttggggctgttttgccttataacccaggttggtcttggactcaacacacgcctgtccaacctcctgagtcctgggattgcagatgtataccaccatgcatggcttttttttaaagttgaaattattcttattattcagtttcagtaaatacatgatttattattggaatagttatgagagaaacagtacattattagactttaaaacagacaagaagacaaaatggtccatgatcttaagtgtccacgttatctttattaaatttataagttaatgcagtgtacattgatcaactacataaattaaaaaaagcaaaacatttatagtagaaaatctgtagcttaaaaatacttgctatacaagtctgagggtatgagtttggtttcaaaatctacatgaaacccaaatacagtatcgtgcattcctctaatcctagtactcctgtgtcaggatgggagactgagttaggagtaaacctagaagctcacagactagaagttagcatggcatatacagtggcctggagaacttgtattcaaccaggtggaaagtggagactgacacccgagtttatcctctgttctccacacatgcaccctggcatgtgtccagctacactcagagacacatacaatgatttctttatttttataaatataatatatgataatttttactgcagtgctttttactgaaattaattccactactgccacagtggtagctgatttgtgtttttctccctcacttttttcttttttgtccattttgttttcagcgggtgtccgaatgatctacccagcatgttttgttctagtccctcaatcagacattcctacccctagttctgtgggatcctctcactgttcagcttcctgcttgggtatccatcaagtgcctgcttccacaagagatcctgctatgtcttcagttactctcactccacccacatctcctgaggaagtccaatcaggtattacactagctccttcatcaataagctctggctacaaatctgatcttttgagtacatcagtacttagcaatttttattttggaattgttaaaacttactggaaaattataagtataatgtaaaaaaactcatctaaatttacacttaacttttgctttttaccctctgtgtatgtatacattgattataaattggtccttttctgacctatttgagaaaaagctacagatatggtatcttcttattcctgcatatacgcatgtgctcccacacacgttttgtgtatatgagtttgcttatggtgctgggaattaaacccaggaccttatatacctctgattcaagatagctcttgtctttgctctctgcatttaaagaaaaaaagattttgaccccagaatgtcactagaattaccaaagcatttgacaaattaacaaaaagtccatcttgttactttcagtttgtttttacctttctatcatttttgtttgttttcagttgatcctcagtctgcacagaagtgggtcaaattttcttcagtatccgatggcttcagcactgacagtactagccatcatggtgggaaaataccaagaaaattagcaaatcatgtggtggatcgagtctggcaagaatgtaatatgaacagattacagaacaagtatgtatttttatttttatttgcctatctatccacccacctacccacccttctgtccatccatccatccgtctgcctgtctgtccatctgtctgtccttccatctgtccctccgtccctcccacattgtatagctttggctagcctggcgctcagtgtatatgtagttcaggctggcctcaaattcacagtgcttgtcatcccaagtgttgagattaaaggtatgcaccaccatattcagttgtatatttattttgatatttaaaatttgcatgctggttaattgagtatggaataaaaacagaaaaattaagttttaaaaagtaaaacttaagctgtgttgtggtggtacatgcatttaatcctagcactcgggaggcagaggcagaggtattcagtcagatctctgtgtttgaagccagcctggtttacaaactgagtccaggatagccagggctacacagaaaccctgtcttgaagaaaaaaacaaaaaataaaaataaataaatagggctggagagatggctcagtggttaagagcactgactgttcttccagaggtcctgagttcaattcccagcaaccacatggtggctcacaaccatctgtaatgggatctgatgctctgttctggtgtgtctgaagtcagctactgtgtattcacatacattaaataaatctttaaaaaaattaaataaaattaaagattaaatttagctctaaatggactatactaaggaatttgtaactcacactttaggaggaagtattctgctacatccagtggcctgtgtgaagaagagacagctgataaaataggaagctgggactttgttgaagccacacaaagaacaagctgtagttgtttgaggtaagttatttccaattgatgatgcttatggatatgtatatattatatttataatactaatatttgttttgggtaacttatgtaaatatgttaagattcttttttctcaaggagaaagttgagaacataagcagcaatttgaagctgattctagaaggacataaaatctcagcagaagtggggctgctgtgccaactgcagagacacttggtggctgttttgaggctctagctgtgttgcttgggctgacgttaaacttgagattttcttgtctcagcatttagcatcctgggatcacagtcgtggtcattatccttagctcatatgtctgtggagaaacacattccttagttgcattatgcctggtaagatttcccaggcatttttatagaagaaataattttcataattttttttaaagattatttattttatgtatatgagtacactatatctgtcagaagaggccatcagatctcattacagatggttgtgagccaccatgtggttgctgggaattgaactcaggacctctggaagagcagtcggtgctcttaacctctgagccatctctccagccccataatttttaaaatagtaaagacactgttgagtttcatgtagcaaattttttattcttgggcagctattggtgaattactaaaataagatcaagaattaatgattttacaggagacatgagcaaaatatcagctttctaattcattgcattattaaaagattggcagcagaagagtttaacttgggattctttgggctattgatttcatgttttgaggcctttgatgagatctgacggtcaggcttttgtcgggttgattactttctggtgtttattaagatagattatacactttcaccaccacttcaaacactagtagtggctttgacatctgttaccatatttgtgattgaatatgtacctacctcttttttccatgaaatttatctaaaggatggagtccttccagaatgtggccaaggttgtagttttttgtctttgttttgctttttacacattgactaggtttacttgaatatattgacagactcaagagctatggtatgtttttacgtacatttaagtttttgcttaattttttgggttgaaccatctagtttttgaaaggcaacactgttgaaaacttgcctctcttggtaaattagaataagtatacgatacattaatatttaacagattaaactagttgactacaattgttcttgaacataatttaaggtaaggattggcaacctttatttacttgtttaaatgtagtctactccttgttttgttgtatggcctatggactaaaaatgatacttaaaagtttaaacagaagggactgggcctagcagcaccggcctttaatctcagggaaggcagaggcagtcaggtctgtgagttgggaatccagcaagttctacaagtaagttgcaggaaagccagggctgttacacaaagaaaccttgtataagggttgaaaaaaaacataaaaacaccccaaaaccaaacaaacccaaaataacaccccccccccaataaagaaaagaaagaaacaagtattttatcatgtgtatggatgttttgtctgcatgtatgtacattctgtgcatgatctgggaggtgagagtatggtgtagaatcctctgggactggagtcacaaactgttgtgagtcattgtgttggtgctggggtcaaacctgggttctctaaaagagcaatccctgctcttaacctgtgagctattgttctagcgtccagatttttacatcttaaagagtttgaaaaagttaaaaaaagtattttgtgatacatgaattatgaaattcaaattttagtatatataaataaaaatttattggaacatatccatatctcattttcatactgtctgtggtgctttcacttggcaatggcagaattgactagtcatgtatcactgtatgtgggtatacattttgggaaattctggatctttaggctattatgagaccactggggggtaggggtgtgtgtgtgtgtgtgtgtgtgtgtgtgtgtgtgtgtgtgtgtaacagccgcaatacttactgtctagtcccatagaaaagagcggtttttttctgtatgcagagatttttattaggcaggtcttttttatttataatgcgcttttgttttagtccttgaaaatggatttcagttattttattgaagtgattttagaggaagacactaaggaatgctgctaacgtaatgcatagtgatcagatctagacaaccggtaggatatatggaatgcttttgcaggtgtctatgtcatagagaagtgtgactttgcaggtttgtttgtttaactattgatctctctgggttttttttttttattgtatagtttatatatttacgtattccccttcccccctctttcataccccttccccctgcttcgatgaggattctccccctcccacccacccacccacccactcccacctcaacaccctagcaatcccctgttgtggggaaacagtccttcacaagaccaagggcttctcctattgatgcccaacaaggccatcctctgctacatatggactggagccttggttctgtccatgtgtactctttggttggtggtttagtccctgggagctctgaggaggtctggttggttgattttgttgttctttctatggggttgcaaaccccttcaaatccttctatcctttctctaactcctccactggggtttccatactcagtctgatggttagctgcaagcatcttagtctgtgtcagtaaggctctggcagagcctctcaggagacatccatatcaggctcctgtcagcactggtagagcttacgatgtgattccttggtagaatatttgcctgacatggagaagaccttggttggttttgatctccaacatccagagaaacgaactccaaagtggttttgtttatgtgagcctaatttatatttactttagatacattttgaagtacttaattaaaaaataatttagatacattttaaactactgcttcattaaaaaatgaccggaaacctaatatatatccacatgagcaaagcatttttaaaaacattaatttattaatttatgtgtatgagtgttt

SEQ ID NO: 1062 - DNA, 32306 bp, Macaca fascicularis
  source 1..32306: mol_type = genomic DNA
gggggctggaggagttacctttggagcccgaaaggaggaaggaagcaaaatatcaacaacagccgaggcagctcgggcgctcggccccggttccccgcttgcccgccgcccgcctgccggcccccgcgcccacgacgggggcccaggccccacggcgccgcccagggcccgcgcggacgccggcctcatttattattccccccgcccggagctgcggcttcctggtgttgaagatcccctggaccaggggcgagggctacccgctctttgccgtgacaacaccgttcccccagccgggctggtgagtaaagaaaaataatgcgcctgccactttaagaggccccctcccccacccggtccaggggttggggtggagggtggtctagaccgtccccctgaggggtgggatggggcagcccccgggccgggaggaactcgcgaagcgggccgtgttttcgtgtggcgttggcggggattacctaggggactgtttgtgtcagggagtctgccgtgggggacaagtggagtgggctgcaattcccttgggtgttgggagtacggggtggggacgggcggattgggggtgcgcccgcttgttcgcgtagggggtttacgacggcctccgagcggtctgggacggggcgccatcctccaagggggtctccggtgacagccgggagcgactgacattttaacagccggccctccctccctctccctcctctcgccgcctgttccctcctccttggcccgaaatggtgcagaagggggcctgggagggcggcgggagggtggaggcggggggagccgcagctgtttgggaagcgggggagggaggggggatgttgttcagatgacaccggggtggtgggttggggtgtgtgagtgtgtgtgtctccggggcccgtgtttgccgggtgcctgtggagttgggacgcggagtcgccacgaggtgggcacgcaggacccttccttgggacctcctagccccgcttccgagacccctgatgtggtttgtcagcaaccccagctggagaactccctggccagaagtttgcagctgttcaacatctgggcaagagttctctagtccctctctccacctatggcaggcggagctgggctgcgagtgggggtttagggagtttgggggggcttttgggagggtgggccaacgagaccaaaatgcatttagtcccctactccaatgccagcctccctcctaccaggtttgggtcttagggggataggggaaaggggccccctccccctagtgaatcacgctgccctctcagcagctttctgagggctccccctgaaaggaaggcactctaggagccaccgactgggttatcccaggtttgcccctctgagtgggagcctccctctgcctccccttacttggtgcactgttgatgggttgggggagggtgtcgcgggcttggggagatcctgtgtccctctttgctgtgcccaacccccattcgagttttcctcggagtcctggtttctttgctttggggtgggggtggcccttatccactcctcctcctatccctgcagtgggtctccgcagcaattcagggtccagcctagactatgggaagtttgccgtctggggcggtgaccttgggctgctctggcctggagataggagggagagtgcaggtcagcctgagattgggtgttttggcgtttgggagctgtccacctcccactcctctcccaaccccaacaggaaggtctcagtagctgaggagagcactgaaaaggcacatgtcagtgttcacagatgtccaccgcttgtggccacggggtcacacccgccccaggacttagtctggctctcccagctcccacggccctgcctgggaatgaatttccttcctgtggtttcccagtgtgttgggcaggagatgggggtggggtaggactattgtgggagtggctgaggacctatttatacggggtgattgggggacactggagcttatatggaacttcttccccacttgccccagcataggcatttgggcccttgggtctcagtggttatattctctttgttgtaactcccctgcccccgccaacacaccctgtatgtttgcatatgtgtgtatatgtatgtgtgcgcagtacatttgtaaagggaggggtctctagtctctctggagggaagggggaagggaggagcttttactcactcctgtagggaccaaaaaggttgagtttttcacatgagatcacacaacaaatctgtataagagctttcgtctttccactcgtttaggcacaacttcatagtagggagggattctaggaagggagacatacagtccgtgttcatggcagccccagtccaaggggagaagcaggacccagagagcgtcatgatccttatgttgggggatgggtgtggggaattggctagagcttctgtctgctgtactcaatgcctgagagagtggtggaggacttggaggggtggcaggtgctgtccgtgtccactccactctgcacttggtgcccctgggctggagggcctgggcatcctggctctgcccccttggctcctggttctcctcataggctgggagatatgatagtctttctggctgctgttatataatctctctgtagcagggtttttttttttttttttttttttcaatctttcctgggagatgtgatggggaagagaaggcagagggagactcttcaggttggggggcgctaaaggatcagtagtaaggaaggttgtggtgggaggtaccttggcccctgaggaggccttggggataggccctcattgattgtggcccagcccgtccgacctttctcctctactgtgccctcaaagggtccctctgctgtggtcgtcccttgctcttatacccccagagaggcctggacctctgcccattttgtcaaccttctcttcctggccagctgggccccctgctctccctgattggcactggatccagaatctcagtgcttttgctggcctggtgtgggcccttggttgcacactttgccacacacctgagtacctctgtggggacaagggaagtccaggatctgatgggtgggcccaacatttccctagttgtatttgagccaggccccctgtttctttgcccctctagtccagagggtggtggccttactggaagagaggagttgagggccttgacttaatacaggccttgacctcttggacacagatcgtcgttggtgttcatcaggttctgtaagtgaggatgtatgaggtatgaggatccgatgtgagcttggaacctgtcatcaagggtcgggttctcagtctcctggcactgtggtggtgggattctccccatcccgcgggaccatggctgggactctcgagactctctgaggccagctggtttaaggcaactatctctcttttatagggaaggaggaaatggtggcaggccggcacaacctcagcatcactgtaatcgctggtggcttttatgagccagtcatggggccggagtccggccaactgtctgtccttctgtcccagtttggtgacttactcatggagggaggggcggttaggtactagaagctgtgttctagaagctggacggctgactgtattgtggttgatgtcactcgtctatccatgatcacatggatatatcacttataatctctctgtagcaggatggaggtaggatggagcttagacttcaagaagaacttcccagtggggaagctggggagaaagagatggctctaatttggcataggaaaggaggggaactcaaagtgctttcttttccagtggctctcccgaaaggccttgacctttggcctggtggggtcggtgctgtttggatcttggaatatttattttctttttcctctccctgcttgtggctgaaagtattctgaggcatttgtcctggagctgtgggagaactagccattaggcccctttctcctagtagtgggaactagataggggtctcatgtagacaggcatgcccaatgcggtccacagcatttagtggtacacatgcaggaaggtgtgcaacgcatacacactggtatatagacacccacagagcagctgctgcactgcgggaggtggggggtagtgaatggcaaagatgattaaaggattggagagttgggatgggtttgaggggaccggaggcaagaaggcgaagggcatagcaagaactttgaagagagaagggctgactggagcaggagggattaaggttagaccacagatgggcaggcagagccctgtctgcaaaataaagagcatggcttgtgagtcaaggagccttggctgacttccatccctgccccttactcctccctcacatgctcctctctgtggtcctggcacagcctgcctctgcccctcacactgaccatgtgtccccgggtcactcctcttgggccccagctttccagatgtacagagtttcgcctttcggtgattaacacctgggtgttttggtggtttgtcgctggtctctgttgccctccccactcaccttgatgaacaaggccactgtgaggcatcaaggctacatcaaagccctcaggcatttgggggtaggtccttggcctaggtgatccccaaggccctcttcatctgacattttccttttcctgtggctgaggctacaagcctcttttttctgagagccaagtcatgcttctggttagtcctggctggtgtggagacaggggaatgcattcatcgattctgcacaggaccctggtaaccaagggggtgggaggctcttgtgcctgtcttacgtctcttctttctgctgtaggctgggaggggagggacatgtccaaagctctggcctgtcacttgccacacccaggcgggaccatatttactcatttaaacttaccctcccaggaggctctgggctctaggcctggtcactgaccttggcttgttgcctctggctaggtgctctggccactctcctaggagctgggcagaccaggaaaccatacagagggaggttttttttttttttttttttttttgtcccctggtcaaaggagctttaccctcagcattaccccacttgcccaactttccagtatactttgaagaccaaaaaccaaaacttttaaatttttttttgaggcaagatcttgctctgttgtccaggctggagtgcagtggtgccatcatggctcactgcagcctcccattcaagcgatcctcccacctcagccttctgggtagctgggactccaggtgtgagctatcgtgccccgcccaaaaaccaaaacttttgagatcccagtggagagaggtgacaggttcccaaaagggagggaggaaacttccatttcttgtgttcgtgtgtgccaagctttgtactgagcatgggaacataagaagactgtttctctctaaaactgttattttgaattggaaaacagagtctcagagatttaagtgacttatttaagctttcctagttattaggtgtaaagggcttttgtctgagattaaaggagagatcctgccctgcaggacagggcaatggaaaggaggtctgagaggaggaggaggagaaattgaagggaagagaaaaccaggattcctcagcagagggcagagaaccggcctttggtggcaaggtgagggaggtattgctttgacttgagtgtcatggagaaagcccccaaagcaagggtttgagggcaagatcaaatgacactccaagacccctcctgctatccctgtgagctgccgcatgggactaatgagaagacgctggagtgggaaggcttgaaccacaagaggctgggcttgtttcaaggcagacacaaggccagtgtgagcctcccaggcccagacctggggagttggccctggaaggaatgtgctagaactcccagatgagggagactcgctcccactcccatccaggttgtgagcagaagccctgtgcccaacagtcagtctgcctctgccccttatttctggtgaccttgagcaactccctgcccatctctgtgtgagtttccatacctgcgaaagggaagtgttgctacctgcctcacatgggaagggaagggaaggaggttccgccagaaaaagtgtgatggttacatcttttctctcagaccttgagccttaggctggcccaggacttgcctgaaacagggatgggggcaagcaatgcctttggtgtccagggtagggactgaggaggccttgagggttcctcctggcctagggctctgtttggccctgggatggtttgggaagctgagcccagccctcccctccccatccagccatctccttgtctgagaacccgcctcctccacacttagccccacgagtcttgccagatccctctggctgttgcttgcttacccctcatgattctctcatcctcaacccaccagcaaatacctagggttgagggttgagagaacaaagaatacggagagagcccatccctgagtttcaagtagaaatgcgcagcaggaggctggagtgaggagagggggcttggtcccttttcctggggtctttccactccagctggatcaagtaatgtgtaggcaagggaatagagcaaggggtttgagggatgacctcaaaccttgagattttccctttaaagcatgcgtgtattgtgcatttggtgagagatgatggttggggtagactaggaggatgggaatgatctggaagtggatttttcagaccttcctgtcacctctctccttaacctatgtgcccctttcctccagccaccaccactgcctcctctgtgctgagtctccttatgcaggcctctggggcccgtgatggctgggtggggacaggtgtcctagcccagctgcttcctcttgtctcccccacctgtcaacctgggggtggggagctaagggggcggggagttaggggaaccacttagcccctcacctgttttgaggggtggggccctggttgtaaactgtagcaggggagtcaagagtagacaacaggcaggacttcccctcataggaaagataactgcagatcataataatgtcagggaaaacttgatagacagaggtccttgctggcaaaaatctgaagggtccctgcacagcatcctcatgaaagggttagaagccaggtattggtaaggggcacagatttggggacatgtatcttcatagccttgtgcagatactgctctccctacccccttccctctgggccccccctccatctggctgggcatcttagcctcacctggcacctttcctgaaagcagcaagctaatcctgtaagagctgcctggctggccgcctcagcaggcccacgcagccacgatgcccgccctccctccgctgccaggggcttagaggactgtccttcgagttagaaggagacccagccattgccctgaacggcccctttaaatcctcagtggcttctcgaggtcatgatgtctctaggaggatttgctttccctgattggattggcctctttcgggtcccctgtcatcatcgtaggtgaacccttcatgttctccacctcccctttcctcataattagtgctgtccagtctgaggtcccagaccttggactctctcccctctctctttgctctcatgtcccagcaatgagggctcagaccccttcatctgcttcagccagagcagccctgtctcagttctgtgggtgagaagaaaggatcttgctgctttaaaaaaggggacaaacacagcccaggaagagaatgcccttctgagactgtctgctgcctgcctctctccatttttctctcttcagcctgcccttcctttggccaggggcccacactcctcattaccccatgcccttatttccatggaaagtccctcccctgatctaaccattagcccacccgctgcaatggcaggcagcccagacccagcactggtggcattatgctcattccaacggctctcaagcagatccgcccccaaggccccagctgccactttcacttctgtctcctgagaccccagagggaagttgggttggggaggtggaaggtgacacactaaccgtcccaacggcccccacctctcctcagtcagggcttctgatggctaagggcccctgtccattgctcttgtccagatgaccaaagtgggttaagtaatagtggaaggattggctgcggtgggagggacggcacttagatagcaggaaggacttcctaggattggagaccactgctgggcttcattgtttcagaggatatggaagcggtgtagatactctggacaaatgtaggtcagacttaaaggtaggtaggagattggttgtctgcagctcccattggttggcatacaatgctggggcctccatgccctcccacgtgtcaccagcctcacatgcttggttggagggcttctgacaaagcaagtttgagccccagagactactttgagtccaagaactcagccctgagaagttttttctgtagtcttatatctatcctacctgctgtcctgggccatttcctcccaccctgcactgtgggtgggttttggaaatggagatagaaatggaagtaaaggacagctcacctccatcctgctgctgctgccccaaccttggcactaaagaggggaatgggattcttctcctgtgacgcctcagggcagtgacagagccacacttcaccctgtgaatcttaccaaactcttgtagctgccatgcttgcttattcctcgtgatttcacacccctcccccatctctgcctagacaagagtaggggacccagttgtactgagagctctagactgtatcactgtgggttactataaatccaataatgctttctggaggggaaagatgggaacaaaggcctgaggtgccaagaactccacgtggtgtccccaagtgcctatggatcctgggtgggggtgacccaggtcctggaatgggaagttgagcctgaaggaataaggtcagagacactatgcaaatcctcatgcaaatgagtggtggtgagtcattgcagcttggcctgctgggatggaatctgaagacagccttaggcttgggttctagagctggtcccaccagggaccaaacagtgaccttgggctagttgctgctcagtaaccacaagcaggtggtctgataggcattcccagtgtgtgaggggattgggatggctgagcctctgccacaagggcattgtgtgccccacttggtacttgttctggctgaccagagcctttgtcaacccttggccatctgttggagggttactgtttagaaggcacctgccccttcaccggtcccatcctgactctcttctagcaccctcattgcctttcctccccagcaggaggatgacagacccagacaggccatctctttggttcctttccatgaattacacaattctgacctcccttccctttgggcttccccagagagcacaggagccatgtgtttgggccagaagggcatttgggtacctagtccacccagctacccataatacgggccagtggggtgaagcctgtagaaggcagtgacttactcaggatcacaccttagaccagagcagggactagaacccaggtgtccagaatcccagcttagagaccccatatttccctaagctgttcattctcctacctcacccatcccttctctactgggactcaatctcctgttgcccccaaatacttcctgagatcagtctgggtagctctaggagcttgttttgcagagtggggtgattacctaggagccagtccagaggccataaggggaaggtcagagcaggagtgggaagtgctggaccctgggtgacaggctgctgccttgtagggagccaaacggcctcacagctgctacaggaaggatgagagctagactacaggaaggacaagctggggtggggaagacatggaggaggctcaggagacagaccctcactggagaggcatctcctgggcagagaacaggatgaccccatcccaggagacttgccagggagaagagggcgggaagcctagggtggggctcaggagagttgtccagcggaagctagggggagggctcagccctgctgtccataccgggtgctccccttggcaagtcaggtcctgtcccttaagctgagactgcagggcctgccccccacttgagttcctagggtgcctggggcctgagaccacccctgccccaggcccagctttcctggactgcctgcccccacagcccgacagcccgcccccaggtcccctgtcggtgagttaaaattagctcagtgcccggctaaaaatagcccctgcccagccctgaggctgctggactgggggaggggagtccccgagggagggaaagacggtgggaaccagggatttgggtagtgagcctgccagacagaactttgaagggttgaggctggggccctgctttgatatgagaccctagaagcacttctggggtgaagaaaagaggctgctgtgggagggggcgaggacagagagggggcagagagaatgcagcatgagagggagacccgagaggggcccaggagcaggggcgtggggaagcaggccatgcaggagggggtgtgagaattgggctgtgtgtgggatggggagagggacaatgtgaggctcctgccttggctcagatttcagaggggtaatgccccccacttcctttgtgaaggaagagctcactatgtgaaccacagaatgattctggaccatcttgcctgggtgtttgggggcatcactgggttcacctcgccaccctgtctcccagagctccttagcctgtgtctctgcactagggaagaggtcccagggctgaagttgggggagagaaatgactaggaaggttgtgaacctgggggtaggatgggtaataaggcagggcctggggatcgagctgggcagctgtggtccttggtcctcggtcctcacttctgctgcctcttagggctggcctgcctgctctgggatactccttccggggctgggtctgggtccagtccaggcccccgagggcccccttgcctctccccgcccttgccctgggtgggacctgcccctcccttgtctgtctcttggctggactgcaagttctcagagggcaggggtggtgtcctgttgagttattcccccagcgctgggccaggagtcagtcctggaagccgttgttgaacctgtctcttgttctctacctgcttctctctgaatctttgtctctgcgggtctcctgcctctccctctcctctagccctctccttgtctgtctctgcttctgccccataatgccttctggccttgctgcctctttttctctgttatctttcctgtgtctgtgtgtctgtcccccctctgccaccctcttctgtgtctgcctcacccacgcctcctccctcattagtgagcaggctgcttgaggccgcctgactgtgggggtgacaggtggattggattgtcaccccctcccccagtgcctgctgcttatttcatgccctgcagcccagccacagggaaggggcgggaggagggatgacagctgtctccagcgcctcctgccttaccctccagtcctcagcctccagcccggagcagcctgggagggagagatgaagggcccgcctaatgagagctccctttctcaccatgaggaagagcaggttgaggcccactgctctgtgatgcgaggctgctcactcagcctctctgggcatctgctcccttttgacctgtgctggtatgggaactctggaagcgatgccctgtggtttctttgagccttgggaccactaggatgggaacagatatgggtggaagggtataggggagaaggaaaggtaggtactcccctgccaagagcaagaaagagaggatagaggctggccatgggaaaggaattcccctgcagctccatgggaaggacagctctgctcagccctgctgcagctgcagggaggctgccctgacctctccccttcaccgctctccccactggccccaggccaccttcacacaggaactgagatagcatcattctgaaacctgagaatggtttgaatattgctcaggtaccaagaggtgttgcactgggggagccagggacctgtttcttctcccatgccccctgcaaaccagtcctcctttagggtaccttttgcacatcatttgtagctcatttgtatgtaaacacaacccacaggttctaactgggtctgtacctgggcttggaaaaatggccatcagtggggtccttctggatttcccctggtcctctcagctctccttcttgtcaagggtgttgtcagagggacctcctgccctgcatcctccctgctgtccatttgtgaagtcttcttctcagccacccttctctatagttggtgagtctgtgcctgcttccctctctgggcatctgctcccttttgacctgtgctggtatgggagctctggaagcaggtgcccggtactttctttgagccttgggaccactaggatgggaacagatatgggtggacattgccaaatgtcctccccatctttgcttctcacatgtctaccaggaaggccctgcctctgcctgtcccagccccctgccacccacgaggttcaccctgccccacccttgtcctgtccacggagtcaggtgaatcagagtcaagcagccagagccttgagagcctttgaaggggaacttttggtgacatagatactgtcagcccgaggagtcatagctgtggcctgaggtcaggattcggcaggccctggggccatcggaacaggaaggccatcctgactaaccccatctctttggtagcccaagtcctcccaagccctgggctccagctaccaggcagggtgaaggagagagggttagaaaagaagcagccaagggccagatcatctgtgagggcttcctagaggaggagtagaccagacaggagaagaatggggccagggaggctggaaaggagagactcacatctggagaacagatgcccaggcctctggctcctgccagttggttaggtaattaggcagagggctaattaaggaggtccaggtgttcattaaaaccttcctaattgtataggagggaggtttagccaggataggcctccaaaccttggatagggtcaggttagggtattttgtgcctacctaggccccagctgccccttcctccaaaatcagggttgagttcatgttgttgccccagggctttcaaagaccctgcagcaatgtggaatggagagcagaaggaaaaaaggtcagtacacactacgcctgctttgtagagaggtttgtggttagatgggaggaaggactgcctaaggcaggggcatctcctcctctggcagtgttggcacagaggtgggagcagcagtggggaaagggccctgggaagcatggaattataaaatgtgctttgggctaccttgatagggagtggggatacatggggcctggtctttttaaccctgacttctctctgtcagacgatgctcagtgaatctctgtggcttccctgccttctcagccctgatccctctctcgtcccagctcccccagcttgaggcgggggtggggggggcggtgtaggagatcagccagggagctggttgccaggcgacagttgcctaagcaaccccatcctctccatctccatgtgctcagggctgctccttagaagactttagagtctcaccctctgcaccagccaacctgagggtggggagggttgaggactaggataccaggcgtggttggagggtgggtggtgtccaaatcttcaggggccgttgggagaggaagggttctagctccatagatgatagaatgagaggaactggtactgcagcaagaccattggaggttagactgcaagaaggacttctcacagcgccacaacaatgaaatagtattttcttcttttcaacagacatttcctgacctccttcttacaggagatagagtagtaaaaaagacagatgtgattcctgccctcatgaaactttagcctcatggaggagccaggcgttaaataaaagcacagaatcatagttattcacaatggtggtaagtgctagaaagattacaagagtgacttttctgagggtcatgaaaacaaagagaggtttatcttccagttcggaggaagaggcagtattggtcataagctgacagaggttacatctcggcaagaatttggttatgaactaaaggtgctgagagggagatggtaaaggggagagagggaaggtggatgctctaaatcagaggaggccggtagttcctgcatttaccagtctagattgagttttcaaggctaagccagagaatcccatttaaaaagccaactattggtagccccctccccttgccctctgtgtgccctcccctaccttccctgccaaagcccacaccactgtagctctagaaagcgtggtctttggattgcaccgggaaggagggaagctgaaatccccgggccggagcctttgcaatgggaacttggcagacactggggtcacaggtgaggaatggggtgtctggaggtggtttggggcccaggtgtctgctgggccactcaggactggctgggctggtgttgctcttgtcccagggtaccagtaggaggcccagggcccatggagcaccttgaggacaaggaggaggggaagaggaggccggacaggtggctcacacctctaaccccagcactttgggaggctgaagcgggaggactgcttgagcccaggagttcaagaccatcctgggcaacataggaggagactctgtctctacaaaagtcaaaaaattggccaggcgcagtggcttatgcctgtaatcccagcactttgggaggctgaggcgggcgtatcacgaggtcaggagtttgaggccagcctgaccaacatggtgaaaccccgtctctactgaaaatacaaaagttagccaggtgtgatggcacgtgcctgtaattccagctatgcgggaggctgagacaggagaatcgcttgaatcagggaggcagaggttgcagtgagccgagatcatgccactgcactccagtgttggcgacagagtgagactctgtctcaaaaaaaaaaaaaaagtcaaaaaattagttgggcatggcagtacacactcatggtccgagctacttgggaggtgaggtaggaggatcacttgagcccaggagtttgaaccagcctgagccacatagcgacaccctgtatctacaaaaaaaaaattattgataaattatctgggtgtgatggcacacacctgtattctcatctacttgagaggctgaggctggaaggttgaagctgcagtgagctgtgattgtacattccagcctggacaacagagcaagaccctatcttaaaaaacaaccaccaccaccaaaaaaaaaaaaaaaaaagaagaagaaaggtaggggatcatttgaagagcaatgcatttatctgcattgttttctgtagatatccaggcagagcagaagctctccagctgggctggggagcagtcttggtaatggggccggtattcccagctcctccccagtcatagattccatgtctttcctctcccgcttccttcatgagcaagagaccaaggatgaactttagcatctactgtggtaccttaggggccatgttgagttgggctggaaagactccagggaaactcagcagccattggcagtgggagctggggggtaggggtaggggttgttctctgtcatcaaacacctctacccaggtagtgggcagtgggtgcagaggatcagacagtggatgggggtctacatccctagactctgcagtagggtctctgagcatggggctctatggaaggggagctctggaggggagggtgggcattctctggtccaggcttctcccaggacccaaatagagtggctttagaaagcctgggccccagttcactgtcctcttccaacatcttccagaaagctccacttttgatgcaaggactcctggaatcagagctggaggggccctgaagtcattccgtgcctccatcccatcctgggcccttccagtccccaaggactcacccagcctgtgtaggcactgcccacactggagagaatgcaccttttctggcccaggctgtgctaccatccttgagccccctcccatcctatggtgcctcctggagttgtgcagtgcagggactgtttctcctcctggctttagcatggagctgttcaaccagtgggctgtgagagggttacaggtgtcctgagacagcaagttctctgcctggtgcctgcatccgcctggctgccagtggcctccccagggtgtatcatttggccctgtattttctctgtctgcttcaagatgtgcaaggttgggaagcactactgttagactgagcttggattctagatgtggcacataccgctagagcaggaatcagcaaactatggcccgtggaccaaatctggcccatgcccatttttgtaaatgtagttgtattggatcacagccatgctcatgctcgttcatttgtgtgttgctgtctgttgctttcatggtacagtgacagagttgagtagttaaaacagagattgtatggtctgcaaagcctgaaatatttactatctggccccaaaatgtccatctcctggtctagaggaatggtttcattgttttaagcagcacaactctttcctcaaacaaaaatcttaggctgggcgtgtccgaaggtagcgagttagctcaattgattgttcacagtcagttaccgatcgaactccttgttctactctttcctctcttttcatttctgcacttgactaggcttataaaaataaaaagaaaccttaggcttaagctcactgaggaaacagattggtgtggaggaactctagttgaagggagatgtaggtgctacaaccccaggccccactacaggactccaggccccagctctggtatgttcttgagccaggggcaccagagacatcccatcctggcaccaggtataccatgcttgtttttcactgactgggcagatgtcctctcagcattgtctccagtccaagctccagaatgggaaccatagttctaggccagaggagcagctggagcacccgggtgtccatactacaagcaggttctagagagaagaatgggccatgggatattctctgagacccggacccttggaagccaggaggtccatttactctgacctagagcctgaggacagcagtgaccaaggagaaagagcctgggccttggtgtgagctccagcttgtgcctggctgtggcataccattgcctcagacagcattgcctcatgttgagggtggagctcagatgctgccagcctctcacaggggtgctgcgagcctggcctgtgtgcccagggagcagggctgggggttttgggggctcagagtcttgtcatgaccctccccttccaggaggctgtgcagaaggtatcctgcagaccatgaactgagcactgttcccagactgttcatgagcacagtgtaaggggtgccaagatccaccacccagcgagcccctcccctccgtagcacgacgaccctcagagaagatggggaggaaaaagattcagatccagcgaatcaccgacgagcggaaccgacaggtagggaagtcttagagccacacaaagcgggtgagggcagggagcaggcctctgcctctactccctccaggcattccaagagggctttgtggaagaggggaaactatgagctattacagaaggggaagggagattgggagaagaggaaccccaacctcttcgcagttcttggagctctgtgtcccaggattccaaggctcatctgctgccacagctagatgagcccatgttcccatcccagagccatatgcaagccttaggtcatacccccaggcactccccatttcccaacaggaatcctccccctcttcttctccactgacctcttcatagcctccagcacagaggtgtggagttctgtccacctgactcctgccccttcagtgagtggactctgggctgtatctcagccctacaagcactagcctggtccttccccaaaccagggactcctgagaccaggggctgtgtcacactgagaatgggggctcctgagggcaggggcaatgtccagccatctgtaggctgggactcccagtcaggccttaactgagccagatctggccgcccacccatccttctctgcaggtgactttcaccaagcggaagtttggcctgatgaagaaggcgtatgaactgagcgtgctatgtgactgcgagatcgcactcatcatcttcaaccactccaacaagctgttccagtacgctagcaccgacatggacaaggtgctgctcaagtacacggagtacaatgagccacacgagagccgcaccaatgccgacatcatcgaggtgggtccacacatacaggcaccaggacacaccccctgcctgcatccacatggacacatgcccgcgttgcatgtacacgcagacctgcctttgcacacaccctggtatacatgccccttgtagcccctcacctgtgtgcacacacatacaaaccctcctcccatcacacaaacccagggcctgaggaggaagcaagggcagttcaggtgaacaggccagtgccaggctgccggcccacacccaccctgccctctccaagagtctatcttctgtcgtccagcgtgatgtaacatctctcttgccttcttgcatcctgtctttctctttgtctctctttccccacttctccatcttttggtgtgcttctgcacctgcctcttccttttttaaatctccctctttgtttccatctctcctgctgtctctgtctgtttgtgggcctggtggttctattttctgtttcaaagagagccaacattgtgaactgttgaaggacataggctttggaattcagctctgacctttattggccacatggccttgggcaggtgcttaggctttcccgagccttggtgcccacctccacaaaatggggccagtacctgctttgaagggtgctgtgtgaattgaatgtccctgcttctcacactgaggtgcgtgcaccttgggggtacagaacttgtgctgatgaagagggtgcccgggaagccacaggcctactcagagatttggaggaaagtcccttatttttatgttagagaagacagatttactctacactagaaggtaaaatttgccttcattttaaagacaaagcaagtatctgtaaagctattttgagcatgaagagggcagctttggagtctactgcagatcccccagctgtgcctccactagagtgtggggtggtcacagtagggactcagtgttcatccccctttccttttccacatcccattccccgctctctctgtctccatctctatttctctgttcctcctcttctcctaagcagagccgaggggctgggatgagcagacccctgcctacctccccctggagaactcagtaccttctggtcagggcttaccacagagtggtcaggcagggactggcccagggcaccagccccttagcccatcccctggaagccccctccctgcctgtcactttggaagtacatgtctccctgccaagggcacccccaggttaggctcaccttccagccctgttctctgtgttccgatggctcctaccaagccgatcttcacacggtgccccaggaggcactgtcagtggggaggggcaggttacattgagtcaggggccggggagattctgggaaccctgaggaaggaggtccgggaagaggaggggtcccttagggaggaactcaggtgaggcgggtgggaaggactctcacccagctgatggcagtggtgcggttacagaccctgaggaagaagggcttcaacggctgcgacagccccgagcccgacggggaggactcgctggaacagagccccctgctggaggacaagtaccggcgcgccagcgaggagctcgacgggctcttccggcgctatggggtgagccccactcactctgtctctgttggcccccccttccggccccttccccccaggcgctgcacaagaagcacagggaatgtgagagccctgaggtggacgaggtgtttgccctgaccccccagacggaagagaaatataaaaagatagacgaggagtttgataaaatgatgcagagttatagactggccgtgagtagtcgcatggagcagagcctccctgtggtgcatggtgtggcttcgcgccctggctctcggctgccctgatgggtgctccgctctgagccatgctcgggttcttagtgatctctgaggaacctctgaccttggtcatgataaacctgcatcccttgctgagactctactgggatggagcataagttgtaagttggagaggcctggagtgtccccctcgccagcaagaagtgtgtagatgacatgagatccttagaggacagcaaagtggaatgtgctctttgtccagatgttattctgggggagaggcctgcttgggctttctctgatagcccaaccagagacactcagccttgtgtagggaaagcagaactgctgaaggggaaggcagcgaggtgggggtgagctctctctgcagcaggccactgggtggagactgcaagagaaatgatgtcccgacttgtggcacaagcctttaacagccgtgtgtgtgaatctgggtctgttctcagggcctctaacctactccccgtgtgtcctgcctggctgaggactaacccacctccattagggggtgtccctggtcctgtctgcagtgagcagagccctgttctcattctctgggccagaaatggacccagagcttctccccaaagtccttccttgttgggagtggcaggcaggactccacaagggcacagggcagggagcttgaactgctggccctaggacgtgtagcctggaaatgagaagaacccttgcctgccctcccaggaaaagtgggatccatggaaggggtcgacctggcctgatcctgcccctccatctttctgtctagtcagctgtcccggcccccaactttgccatgcctgtcacggtgcccgtgtccaatcagagctcactgcagttcagcaatcccagcggctccctggtcaccccttccctggtgacgtcatccctcacggacccgcggctcctgtccccccagcagccagcactacagaggaacagtgtgtctcctggtctgccccagcggccagctagtgcaggtgagtgggctggcaggtgggtaggtgaggtggaaatgagatgtgatggggactttgggattccattttcaacggccagtatttctcttcactaccacagcattctcccatttgtgtgactcctgagggaagggagtatgattcttcctcctggggtcatctcttcatgttcagtccccaagactcactcttgaagggggagtgctgtcagctcatcctggttctgtttttcctccaggggccatgctagggggtgacctgaacagtgctaacggagcctgccccagccctgtcggtgagtgcagctatccttctacctggaggtggggaggggtgcccactcagtggcctcagggggtccaaggaccaggaccgggtcctaggaccaggaaggacctagatgaaaggagaggaagatcccagagccagaactggatgaagatcagttagagatttttaagcccctggattttgttttctgtagcagtgattggtgtggatgatcagcagagatggaggctcagggaattctgggcaaactgtgagaatgggccagcatttctagttggaggggaagacccaagtttttgcagttgagtgtggttggaatctggaagatgagaatgccgggcgttgcccagacaaacaatagggacagactcacgtaaacactcacacagtctctcacacatatacgtgcattctccctcttacagaagtatccagatgttagatgtgcacttgtgagcacacatacataagccacagaagaggctgggcgtggtggctcacgcctgtaatcccagcactttgggaggctgaggtggatggatcacctgaggtcgggagtttgagaccagcctgaccaacatggagaaaccccatctctaccaaaaatacaaaattagccggatgtggtggctcatgcctgtagtcccagctactcgggaggctgaggcaggagaatcgcttaaactcaggaggtggagattatggtgaactgggatcatgccattgaattccagcctgggcaacaagagcgaaactccgtctcaaaaaaataaaaaataaaaaaataagccacagaagaaaggctgtcggctgtcccccacccctggcagccgacagcccctcctaccctgtgccgttgtccggctgggtgactgtgacttcgaatgtcatgattgacgtcaccctgacattcctgccattcccagagtgatcccggaattgggatggaggcaggcacacacttccagagcaacagtgtgctcttaggggacagagcaaggaggcatttctgcctgtggtcaccctcacatccttggacctcagcatcccccagctcagttttggggcactatgtaatacctccctggtgataattgtgtcacagggtcaggaaattaaaggagttggtgagtgtcaccctcttcaaggagaaggtcagagaaatgcttgtagacctcaagggagcagtgatacatagagacccttgagtccagcatgtggaaagtgggagagagcactcacttggcctccagccagctttgtggccctgggcaagtcgttatacttctcccaagcatgctctagtttcctcttctgtgaacagggctaatgtcctgtctgtcttgcagagttaatgtgaggattaaataaggtaatacatgtgtgaaaggcctgtgtgattgtagaatatggagcagatataaaagatggttattacatttgttattaccaggctaattatggtggtggctgtgttatctgtctcccagtgccaataacaccatcaccaacagtgaatggcttgtttctcccaagctgttggcaacttgtcacgtgttgatccaaatcacatcatccacccccagctcacggcaaatggagcagtccgagtggttgttggtttgtcatggtgaccaggcttctcagtgaggcccagattccaggctgccgccccttccacatcctggtcatggtgggtcctgtctgggggagactgtgggatctcaaaatgctggacttcctgcctgtggcgactaaagaagagagaagacagggagaggcttgggtacagaagaacctcttggccgtcgcagagcctagaggcaatggttgctttccagttcttcccatggacctcagagtcccatcaccgagtcccatcacatgtagcttggagttagggaaatgaacctaaagattcaggagtaaggggtacttgcctcccattattcccaagacatgaagtgtttagggaatatcagatagctcagccgctactcaaagcctgagtgtggctttgagaggttccaggtgacaggagtattggtgtggggaagttaacagggctgaagggtaggcccatgtttttccttttaccctcatgttgtcacttctccaggaaatggctacgtcagtgctcgggcttcccctggcctcctccctgtggccaatggcaacagcctaaacaaggtcatccctgccaagtctccacccccacccacccacggcacccagcttggagcccccagccgcaagcccgacctgcgagttatcacttcccaggcaggaaaggggttaatgcatcacttggtaagtgggtgtctgcgccaagggtgggggctggggaatggaagagtagggacaggggaaagagcagacctctagcaggagagatgaaggctagccagcagttaggacttcccgagagagatcatggaagcatgactttttatgagctttttcttcccagagggccttttaagaggttgcaacacaagaagtaccagcctaaggcactaaaaagggacaggaggtgagagagaaggttctgtgatggggaggatcatagaaaggatttgccactacagcagaagggatgggggattagattgtgagcatttcctaaatggtagagattgggatggagcgtctctggaaatcagtcaggacagtgactctgcctttgtaggctgggtagagccatcctactcttatgcagagaagtgactcttaacggctgtggggacagaggtgtgggggagggcagtggccagagactgaacatgcccttggttttatttctgctctcagactgaggaccatttagatctggtaagtgaggctgtgagctgtttgctgtggctttgaattctgggtattgctctacggtccctcagcatgaagtacgtgtgcatccttggcctctcgcctgtgcgcagactgttgctgcttcttcgcttagttgccaggagctgtgcttaggtgccaagtgggattcagaggtgaatggggcgggggtgagaggtcaggtgcgtgtgtgtgtgtgcctgtgtgtacatgaatgtctgcatgtggtgttacattcattcagacatgcctttctctgtatgtgtgtgtgcgagggggagtgggccagcccaggactcagaggccccaccctgatgcctgtactaggccctggactaggggactggatcccactagtcctctgactccactcaggcccatactgcattcttgggatccaggacaggatccttcttaggagggaggtcagctggaaggagaagtcagtgtttcagaggaagctaaggcccaggaccaggctggacttgtccttcttggtgggggcttcccacctcccctgtctccctgtgcttcctcctgcacttagcccatggcacgggcactcagaggcatgcacagctgctcattttcctcctctctctcacacacttacatactcacccccagccaggagtggggcgggggctcctccctccccatctccctgacgggaggccagagaggctggaaaaggcaggcaggctttggcggccaacacggcggcagtttcggccccagcgtggagttggaataaacaagtgactcagcggcagatggagctgacagccccacacacgtgtgtgcatacgcgcaggcacacgccacgccaggccccacattcccctcgcagatgccagcacgcctctgccggggcgtgtgctgcagtgtgatggatggagagtgggctccagagggacagggcatggacgatgtctcccttccctcactctgcactgggaggctgggcaagtgtcagtgctggggccacagggccagcacacgtgcctttatctttgcacgtgtgttagtgtcagtgaatctctgtgtgcatgtttccctccatggatctgagtgtctctgtgaatgcaccagcgtgtctttgtgtgtctgtgggggactccgtgctaagacaccccaccttggctttgggattcagggaccccaccttggcctcgggatggagggccagcatgaagctgcccacctatcagccacctcctgacagacagttttctcctacagaacaatgcccagcgccttggggtctcccagtctacccattcgctcaccaccccagtggtttctgtggcaacgccgagtttactcagccagggcctccccttctcttccatgcccactgcctacaacacaggtgagtgttcatgtgacatgtgcatgtgtgcacctgggcttggggcaggcagtggccagacagaaatgctagctatcccccggacaggccccatctgaggagggccattgatttgggggagcctgcacctaattatggttaacagatttagcaaataaaagcaaagaatgcttttaaattcaaatttcagataaaataagtagttttttagtacaagtatgtcccaaaaacattcttctgctaatgtatgtcccaaagacatattttatttttgggtttttggttctttttttttttcttttttggaacagggtttcactcggtcacccagactggagtgcagtggtgccatcttagctcactacagccttgaactcctgggctcaagtgatcctcctgcctcagcctcctgagtacctgggactacaggcacatgcccccatgcctggctctttttaaattttttttgtacagacagggtctctctgttgcccaggctagtctcaaattcctggtctcaagcagtcttcctgcctcagtctcccaaagtgctgtgttaccgactgtgcccagcaccaaatacatacttatgctaacaaattatgcattgtttcatctgagagtcaaatttaggcctttttttttttttttttttttttaaggcagtctctgtcacccaggttggagtgcagtgctgtgaccttggctcactgcaacctctacctcctgggttgaagtgattctcatgcctcagcctcttgagtagctgggattacaggaacgcgccaccatgcccagctaatttttatatttttagtagagacagggttttgccatgttgcctgggctggtctcaaactcctgagttcaagtgatccaccaaagtgctgggattataggcatgagccaccgtgcctggccagcattgtttattttttaaatagtacttaatggaggagggagcctctgtcctcaggaagcctgcagcctgaggaggagacaggacagaggcaggtctgcagatgattcaggctgaccaatctctaggctccaggtatggggagtggtgagggggacatggtcagttcagaaaagcttcctggaagagaatgaaggaatgagggagaaaagatcaaggaggctgaggaggccagagagaaaacacagtcagggtcagtttgccagcttcctgggaaagccaaatgggggctccagggcaaggcggagggggaagaaaagcgtctctctaattttggcatggttgtggaatgatgatgggggagggaaggaggaagagggaggaaggttggagaaggggatctgaaggtaaagagtcacttaaggacatgagaaaggtctctggatagaagaattcaggtaggacgcccagtgcccaggccgtcctgagtccctagggccatcctggcctgtgtcacccactcatacctgcaccggaacagtctgtgatactctcagccatccttgcctgtactcttaagccgctgtgtcaggaaggacttggcagtaaggaaatgccttgtcccctggtttcagagcattcatgtggctggggaacctgggctctttccagctagagacctctgccttcctcaggttctctcacatgtgaatggttatgtcaggccagttcctatgatgagtttagtctggaccaaaagacccataaacctctcccccttccccaagcctcccagagttgcaccatgctaggtaccagacaccagtgcaaatacccacaaaatcccacctcctccccacgtgtaaaaatccagaacccaggccgggtgtggtggctaacacctgtaatcccagcactttgggaggctgaggggggcggatcatgaggtcgagagatggagaccatcctggccacatggtgaaaccctgtctccactaaaaatacaaaaataagctgggtgtagtggcatgtacctatagtcccagctactctggaggctgaggcaggagaatcacttgaatctgagaggcagaggttgccatgaaccaagatcgcaccactgcacttcagcctggtgacagagcgagactccccctccaaaaaaaaaaggaaaagttcaaacataaaaagaccgggcacagtgactcatgcctgtaatctcagcactttgggaggccgaggtgggcagatcgtgaggtcaggagatcgagaccatcctggctaacacagtgaaaccctgtctttactaaaaatacaaaaaattaagccgggtatagtggaatgtgcctgtaatcctagctacttaggaggctaaggcaggagaatcacttgaacttgggaagcggaggttgcggtgagccgagatcacgccactgcactccagcctgggcaacagagtgagactccgtctcaaaaaaaaaaaaaaaaaatagctgggtgtagtggaatgtgcctatagtcccagctactcgggaggctgaggcaggagaattgcttgaacctgggaggcagaggttgcagtgagctgaggtcacaccactgcactccagcctgggtgacagagtgagactcttgtctcaaaaaaagaaaaaaaaagaaaaatccagaacccagccctctgtataggaaagcccctcgtggcaggtaagagagctggagggactgcctcatgttgagggaccagactctggcttgtatgtctgtgtatagttactacccaggtgtctgtgagccccttctcccttgcatgtgcacccatgtgtgtgcccagccccaggctactatggtctggcaacttcagagacggctgcttcagaagacacaccctgtgggcccatctccccatctgtaagaggagtgggtagacaggaggtctatgaggcttttccagccctgccactgggcctctggggcccaaccaaaaaaaccagccctgaaggtggggtggcctagggacagtgacagttggcagagggcacctcagatcactttttagaccacttttctggagctgtttatcagggactctgtgagggtggttttctgtttttctgccatcttcttgggcccacagtctttgtgaagctggaggaaagttagttggtgtcagccaacctgggacaggcactcaggaaggctagacttaaagattctcatctgtcactctggtatgaaagcagtttctgcccctgggccacccttggagccctgctgggaagtgtgtgagatttctcatcttctctcagagaccacaggctccctttcctcttgttacaggagcagctaagcagatctcagtttaaacagcaggtgttttcaggtgaccctaggtatataaacaaaaccccagtgaacacattgctgtttagttattcactgtttacagtccttggctgcagttcaagttccggctgggggtaatcgggctatggtaatgcctcatgtgagggcctggccctttgttgacactggctgcagaggcctggctgtggtggctctgggagcagaccagtaggctgccaggtggccttgggccatgctcctccttggggagccaagcctcccagtagatagggctggaatctggtgggacagtgcagggctgggagctagtctccaccattcactcactgaggggccttgggctgcactgttctgggcttggcttcctagtttgtaaaacaagtgttagaaataattgattctggctgggcgcggtggctcacgcctgtaatccaagcactttgggaggccaaggtggacagatcacgaggtcaggagttcaagaccagcctgaccaacatggtgaaaccccgtctctactaaaaatacaaaaattagctgggcgtggcggtgtgcgcctgtaatgccagctatttgggaggctgaggtaggagaatcgcttgacctcgggaggcggaggttgcagtgagccgagattacgccagtgcactccagcctgtgtgacagagcgagactctgtctccaaaaaaaaaaagaaatagttgattctagggcctgtttctgcccttgctctgctttttaaataagcatttcaaaactcctggccaacgttaggaaactacagccaagcacagatccccctctagagtgagattgaaaggtaatagagtcctggagtcctgtcttatctctgccactggctggctccatgacctggagcctgttcctcaaacttgaggctgcagttgcctcatttgtaaagtaataataggtaaatcttttgattattttctatgaaccagacaccgttctacatgctttttgtgtaccaacttgctcaatcctcacaacagctgtgtgatgtaggtaggattattacctccagtttatagtcagagtaagtaacttacccaaggtcacatggcctaagtggaggtagcctggaagtttgacctcatagctcatgcctttaaccttattgctatattgcagagataatactatcttccctgcataaaaacagagggctggagcaaatgacttgctgagtaatggcatagtggtggagtattaggatgattgaggggtgcgttccccatcacagccctcccactaccacagtgcagcctcagggaggacatgttctttctttcagaaattctttctttcttttttttttttttttttgaaacagagtctcactctgttgcccaggctggagtgcagtggtggtgcgatcttcactcattgcagcctccacctcccaggttcaggcaattctcctgcctcagcctcccgagtagctgggattacaggtgcacgccaccgcctggctaattttttgtattttaatagagatggggtttcaccatgttggccaggctggtcttgaaaatgtccacggaggacattttctaaactctcccaaacagaatacagcatgaaacaacagtgctgtgtaaattatgaaacattccgtgattctatttattctgtgacagtgcaaacatcagtttcttctttaaggtagacgttttatgacgtagtaaacaccccctcatggggatatctgctggaaccttgaccagctgtgctcccagcatagtgcccttgcagcccctctgccccatgggcatgaggcctcaggggctaacttgtgtcctctatgtttacatgtgtgtgtgggcacagcagctcaaaccctgctgctataaattttaggtattgacagttgaggaggcttgggggctgtgccggaggtggaatagtagttgcagggatttgcctctgaagcccttttcaccaagcttttaccagggctccccactaccttagaaaggcaattggagctttgggcagtgggatatcatagtcaatgaggcttattcaaggtgttatagttgctaattgaaaactttaccagtacccaccaagatgacttgaaatataattggcattggcagtttttgacagtctctacagagactgaaccaaaaaaataaaaaaaggcagttggagacttgccaggtgaaaaaagacgacagttagacatagaccttctctacttacgtttttccatcttcttattttttaaattgttttttttttattttcatttatttttatttttattttttttttgagacagaatctcgctctgtcacccaggctggagtgcagtggccggatctcagctcactgcaagctccgcctcccggatttacgccattcttctgcctcagcctcccgagtagctgggactacaggcgcccgccacctcacccggctagttttttgtatttttagtagagacggagtttcaccatgttagccaggatggtctcaatctcctgacctcgtgatccgcccgtctcggcctcccaaagtgctgggattacaggcttgagccaccgcgcccggccttaaattgttgttatgaaagtgatacctacacatgatttttgtttgtttgtttgtttgaaacagggtcccacaggctagagtgcagtggcatgatcatagcttactgcagcctcagcctctcaagttcaagcaagtcttctgcctcagccccctgaatagccgggactacagtgcatgccaccacacctagctactttttaagttatttgtagaggtggagtctctttatgttgcccagactggtctcaaactctgggctcaagtggtccttctgccttgaccgctcaaagtgctgggattacagacatgagccactcgcccagctgacttttttttttttttttttaagttcaacactatttttaaaaaccaccttggccgggcacggtggctcacgcctgtaatcccagcactttgggaggccgaggcgggcagatcacgaggtcaggagattgagaccatcctggctaacacggtgaaatcctgtctctactaaaaatacaaaaaattagccaggcgtggtggcgggcgcctgtagtcccagctactcaggaggctgaggcaggagaatggcgtaaacccgggaggcggagcttgcagtgagcgg

SEQ ID NO: 1063 - DNA, 29567 bp, Rattus norvegicus
  source 1..29567: mol_type = genomic DNA
tgtcgctttaaatgtctgggcgtcaaccgagccgggtcaggggaaaggaggggacctgtcacaggtagagggagcagcggagctccccaggtaaccaccagattagagaacgcgatctggcatcggagctttgtcacacagtaagtgtagaagctgggtccttccaaaactctcatctccccagaacttatttacccttagacccctgccaactctggggctggggtgctgaggttccccgcagcctccttccatcccgcaggcggagggatctgggctccacgggccgcggtcgcgcgccccggaggggtggggcgcaggccgagggcaaggggcggggctgcgtcccaggcctctcagccaggccccgccccccgccccgcgggggcctcccattggccccctgcttgtccatcactctagtcttcccccctccccttctatctcgcaagctaggctgcgctgtgcctacgtcggcctcgagtctggggctggaggagttgcctttggagcccgaaaggaggaaggaagcaaaatatcaacaaccgtcgaggcggcttgggcgctcggctgcgtccccgccgcccgccgccgccgcccccgcgcgcaccagggggtcccggccctgtggcgccgcccaggccgcgtggacgcggcgccttcgctgttccccgtccgagctgcggcttcgcgcagccgaggattccgcggaccgggccgaagctcccggcgccgtgacaccccgttcccccacgggctggtgagtcacgacgcgcgtcggcccctttaagagcccctcccccatgccgcgcggccgggcgcagggtggtctggagcgcgaggggtgtacgggcgccctggcataagcgtcccgggccgagcggggcggcggaggctgtggtggtgctggggtgtctgctgtgacagccgcgcctggtacccgagcccccgccgcctcgcgccttggcgggctcaacgcacgtggctccggccgcgatctcgcgcccgtggggacccccttgatcgggcgtgtcagcaaccccaggtggagaacccctggacagtagtttgcagctgttaacatctggcaggacctctccaggcctcccttggttggtgcggtgcgggccgagtcggtgcgagtggggttcgagcggtgaggctggcccaagggactacggtgtttctggcctcccaccgcagagatggggcagagaggcctcccagagattccatcgagccctcggggttcccagtggccctggactacccagcttgtcctgagtgccagttctgcctacgactgaccggcgcactggggccaggataggggagtacagtggttggatccggtacccttccctacccgtgtgagtttcttctgaggcctagcgggttagctgtgtgagtggtggatcttctccctccccctagccctcagtgggtctgagctgcctgactgtgggaagtttgccgtctgggacggtgaccttgggctgctctggccgaatctcggagaggagcctactgagtgcacttggccttgggagctgtccaccttctgttctctcagtatccgcggtaggtatccgcggaggggagctttggtgaggtacctgtcagtgtcctcagacagccagcttctggccactggccaccaagccccagtgctcagcctggctgtcccagctcccatggccttgcctgtgaatgaatttccttcctgcgtcttccaggatgggggtggggtgggatgaatgtgggagtggctgagaaccttgttatgtagggtggttggggaattctggagcttctgtagagcacttttcccatataccccagaaatggacagaggctttgggatctcagtggtcattgtctttgttgtgactcctgtgcccttcatacaagtaccttgtgtgtgactgctgcatgtacttttagggagtcagcagctttcattcattcccatacctaccaaagtggtagagcattttacttgagatcacacttcaaattttctatcagactttggtcttccctctctctgtcacatatttcatgcagggactcttaagattaagaatgaagacatacaagccttgctcatgcaggcctgagcttagagaagaaacaggacccagccagaaagtatgggaagccttgtgttgggggatgggcacagggcttgtgctgcctctgttaagcccagtgcctggaacagggtgtgggggacttggacaggaggcaggtgcaggttgcccatccccctctgtgtggtgatatggggctggagggccccagttccctgctctggctctctggcttctagtgcacctcataggctgggcgatgtgacaggctggctggctgccgttatataatctctctccagcaggtttttttttttttttctttcttctcctggtcttccttggtggtgtgttgggaaaggtagagggagtctctccatgtctggagctggaccaggggacagggttaagctcactgaggccccactctgaccctgctcttgaaaggggcctctgctgcagcatccttggcccttatgtccttggcctggacctctgtccgtcttcccagctttgtcttctgtgccaactgagtttcctgtcctccatgattgctctggcctagtgcaggtccttgggacactttgccacccacactagagttgagttggtaggctggcttttttctgttgcctccacttctctgtcccttacctagacaattgtgtggcctacagaagagctgcaggcgagggggacactatgggtcacaagtacagttggtattgtccaggttccctaatgggactgataatctgaggcaggcccaaggctgttggcaaaggtcagatctaggactgtggatctgtggtggtgggctctccccacaccttgagaccttggccaagactctgtaggtcctctgaagccaactggcctgagcaaattatctccctttacagggaagtgggaaggaggaatggtcgcacgccgcacagcctccgcatcgctgtaatcactggtggcttttatgaggtagtcatggggccagagtccagctaaccctcgctgtcctcctgtcccagtttggtgacttactcattggggagggggtggcattagctgctagaagctgtgctaaagatgcagacatctggctgtgttgtggctaacattgtcctctacacagttaagagaaggctggatgaagcttggatatcagaaattccattgaagccaggttagggaaaagataactcttaacttggccagtaaaaagagggaatctcaggcattctccagtgactctgctaaaaaggcttttgacctatggcctagtgggccggtgctatttggctcctggaatattttctcatctctccctgcctaggacaaaacataatctgaggagttgtcctggagctgtgagaatactgtcctctgagtcccttccccagaaatcattttgagggtctcttgcaggcccagctgcacctggcagtctgcagcaggtcatgggacacatgcagggaaggtgtgcagtgcactcttgggggtgtgacacccacagagcagctgttgcactgtggggggtgggggcagtggtggtaaagatgattaaaggattggagagtggggggtggtgagggactggaggcaggaaggcgaaaggctcacagaacccagagagcctgggctggaagcaggggctgaggtcagagcacagatgggcaggcagggcctgtctgtggagagcatgctttgtgagtcagggagcactggctgacttccaccctcccttgttgcctgttccctgttgccactgccccccaccctggccttagtccttgggtaagttgtcctttctcccacctcagcctcagccttccagtatgcaggagctcctttttggtggcactggcatctgggtgtttaatggaagtcctttttggtggcataggtttgatggtccatgctgttgtctgtctctgtcttccataagtgaagctacttatttgggtttaggatttcaaagcatttcatacctttctttccctggtccaggcccaggatacatgccaccctactctgccaatggcagagttatgcagtactgctagtatgacatggattgaggcagctgactgtggctgacagccccttctgagtagggtactagagggagtgacctgccccaagctctggcctgtggcaagccacacccaggcgggaccatatttactcatttaaacttaccatcccgggaggccctgagctctaggcttggtcactgaccttggcttggtgcccctggctgttctggggcccctcccctagcattgggcagacaacatgccacagggaaggcgtgtcctgcctgtccctagctctcccctccagcatcacccatgcacacccagtttaacagggtacatggttcagacacaaaagtgaggacttgggggaaacctagatctgggggtaccatttgttgtctctgtgaagatcctaagttgggcagggttctgtctgctacaggtctttggtattggagaaacagaagctgatagcctaaggagttatttaatgaaatctattgtgaggggttgagggatcttgtcaaaaagatctgatgccaggaggtggtgataaatgactttgatcgcagtctagagaggcagagcaaggtggatctctgagttcaaggccagccttgtctgtagagcgaattccaggacagctagggctacacagaggaataaaaagaaagaggaaagaaaagaaggcatctgtctgcaggagcaggaggtaggttctaggctggtgcagcactcagaggtctacagggtgtgtgtgtgtgtgtgtgtgtgtgtgtgtgtgtgtgtgtgtgtgacaatttgaggatgcattcttttgactcctgagactgtaattccttcagagttccccatcaacggaagaggccccaaagcaaagatctggagcaggagtcagcaacactgaggtccctagaccagcttggggcagacgggaaagggattgaaggtaacatgggggagggcagccttatctccttcccagcccctgcctttcctagagaaagtggggagtgtcacagacccaccttccctgggatttttttttttttcttcttttttccggagctggggaccgaacccagggccttgcacttgctaggcaagcgctctaccactgagctaaatccccaacccccttccctgggatctttagcctagaccaaaggtgtggaggtaaggagttgagggggctttgaagggaccaccagaccctaggatggcatgggaaacaaatggtctcctttccgtgccaagcctgctgcctcctgttcttaaagcttgccctgcagacatcctaggtcccaggtcaggtcctttgctattcctagtgatatcctcctccagattgggtttgaaggctgggtgaatagagacaaagacaaaaggttcaggggggtggagatggggggcagatggcaagggaatagacttcttttctgcgatcttcttgttacagtggatgggatggtggagaaggggctgtgagcaagcgagctagagggctgaccttcggcctgcctgccaccttctctgccaggcactgtaggcaagggtggcgcatcctgaagagggtgcttcttgttctgtctctccccttgacatctgcacccctctctttttgcccccacacctgcctgcctcttggcaaactccccttgtatggtccccatgacaggctttggctgggcatggggtgggaacaggtgtcctggcccagctgttactacccttctcccccacctgtcagcctgcagttgggggcgggagctaaggctaaaggaaatcttcacctgttcccaggggtgggccttgcttgtgagagctcctgaaagcttcccctctgaggaaggccatggcgcagacaacagtcattgctgacaaagtcagggtccctgctgtgttctgataaacagtgaaccccgtttgatgaaggtatgttttgatgagagtgtgtttgcccaagggtgctcaggatcctctgggttaggtacccatcctcaccttgcgtctttcctgagcgcagcaagctaatccccataagagacaccttgccaccttttgcctagggcttagaaaccaagccactgcccaaggcccctttaaacccttggtactccttgaggtcacaataccaggaggatttgccttccctgattggattggcctctttctggcctggcctgtctgacagtgggtgcccttcagactgcactgcctctcattccccatgccagaagtccagcaattagggctcagctcttggtctgttctttgagcaaaaagaggtccctaggaaagagtcttgctgaagttctctagccaactctgtggcccaagtcatgctcaggtctccctgcccttctcacgcccgtggggagctcctcagctcctcacagcaccccctgcacagcagcaggcagccctaacccagcacaggagcatgctcatcccaacagcctgtccagatgagctgtcctcaaggccccagctgcaactttcacttctgcctcctgagaccccagggggaagtagggtagggaggtggaaggtgacacactaacggcccaactgccccacctctcctcaactaaggcatccagtggccaagatctccatatgctattcttgtttagatggctgaagtggacttaagattgccatggcaggattggctgtgagagaaggatggtagttagatacttagaaaggacttcccagagtaggtagactgctggacctcagttcagagagtgtggctgtaactggacagatggaggtactcaaggggctggttgtctgccagcatccatggtaggaacaagcaccttcatgactcccatgtgtcctggtcttggttggttagcttatgacaggtgagcttgagccccagagtctgctatgggtataggatccagtcttttttttttttttttttttttttttttttttttttttggttctttttttcggagctggggaccgaacccagggccttgtgcttcctaggtaagcgctctaccactgagctaaatcctcagccccggatccagtctttaaagtcttgtctgaaatgtagttcgtgtccactgtgctgcattcttgagagcgccacacagtggtgcaggatagcagtggcctgctgctgccttctctttgaggctttgagatggactgtgtgtcactgatcctttccctagacaggaatgaagggcctacagaatgggagcttcaggctacatccctgggctgtttgtgaattgagggtttctttctttctggcacagaaaatggaaccagtcctgaggtcctgagggccattggacagcctacactctggaatgggaagttgaatttggaagaataagggtggggacactatgcaaatgaccatgcaaattagcatcagtgagtcagtctacttggcctgttaggcagagctaaagcaaagcacaagcttggatttcaaaagtgggtcacactagtgacagtgaccttgggcccaaccaaggccagggcctttagaggccccaaattctgggtcccattagtatatgggaggaccttgataactgaacttttgccaggacctcctgtgttccacctgccactgtccccaacagagtggccctgagccaactctccctcatctactaggggtgacagttcagaaaacttcctggttaggctccatgtcagcctccacagtgcctttcctcaccagctgaagggagcctagactggcacttctcaactacatggctgacttttcttccagggaccctcaccattctgcccctctgttttggggggtggggccgcattgcagcagtaccttgatttgggcacacatcttagtacaggccagaaaagcccagcccagaccctgcaagtcctttcttcatggcctgacctcactcactgcttcactaccaggatgcagtcttcagtagccccgaatggctccttaggtccttaggccggcggcccagcggggtggctctgggaactttattgtgggtgggaggaactttagctaggtggaggaggcctttggggagcctcaaggacttaactgctaccaggggggtgagagctagactgcaggaaggacagggagtgggacatggaggggaaaaagccccccttggagaaaacaggataacactttcccaggagatttgctaggcaggagaggtgggaagccgagggcgttggagtatgagagaattgcccgatggaggctagggagggctcccaggcctcctgggccctcctcaagtcaatttctgtttttacaggccacagtgcctgagaccaccccgcccaagccctgttttcctggactgcccccccacccccaagcccgccctcaggtctcctgttggtgagttaaaattagctcactgcccaggctaaaaatagcccctgcccagccccaagctgctgtctgggggaggggatggtgggacttggtgggaaccaggggttttggttgtcagcctaacagaacttaggcttgggcctgtgcttttggatgatgatgggaacttagaagaagagaggacctgaagcgcccccccccccccccccccccccccgcgcagcaggctgctggggcacccctaggctgctcagcccagccgttgtcccagtcttgtgcctttgcctcactggcccctttctgtcttcttcctctgtctgtgcatctgtccccaccttgcctacgcctcctcccactagcaagcaggctgcccgactgtgggggtgacaggtggattggattgtcgccccctcccccagcgcctgctgcttatttcatgccctgcagccctaccagggagagggtggaggagggtgacagctgtcttcagtgcagcctgctttcccgagttccagcctgaggccccccagcggcctagaagggagggggagctcctaatgagtgcagttccctccttgtctcccactcccttctagaagagctcagggcttggcctttctggcctctgctctgttggagcctgctggtatagggctccagagtctgatgcatgcagctttttagagcccaggatacagtgtttggggcagaaaggtgtgagggaacagaaaatggctaaagagtagagggaagatggagactgctggggaagggagcttccttcctggtctttctgcaatggctacagggcctgtcttgacctcactcccatctccacccaggcccttcacacaggaactgtgacggctcattctgaaaccccaaagtggtttgagtattgctcaggtaccaggaggtgtgacatcagggagccagcctagtctccatggccgccatgcagcaccccttcacttttcacttgccctgcttttgcatataaacagtgccagttgctatgggatcccagatcccagacttctctgcccccatggccaccctgctgttggctctcctttctgctgctgttgtcacagcctgctggtaataccaccctgcccagctagaacctgctgaggggcactgctgtgatacatctgtggctgtaaggtcaggatgggaaggcgcctggggcctggcacctcagcgtgattgcccagggctgcagactagatgcagaacaacagcccaaccagtgcacaccgttaattccagcactcaagaggcagaggcagggggatctctgagttcgaggtcagccctgatctacagactgagttccaggacaactggggctccacagagaaactggggagagaaagggggagagagaagaagagcagcagcccaaagagcagcgctgcagaaagaggggtagttaggttaggccgcagcgaagcccgcatctggagagcagatgtccaggcctctggcccctagtggttagttaggttgttgaacagaagactaattaagcaggtccaggtgttcattaaaacttcccaataagagtagggaaatttgggcaggatagctccacaccttgaatggggtcagtctagggtattttgtgaccatctcagcccagacaccgttcttccataacagagattgagttcatatttttgccccagagcttccaaagagtccaaagcgatggggaatggacagcagagtggaaagagcctgctttgtaagagaactgtggttagctaggagaagggactggccaaggcagggtctgtcctcttgcagggtaattctggcagaggaagagtagcagtgagggagaccctgggaggcatggggttataaatggctgagctagtatagagggagtcagggttgttgaggcttggcctcttagacaggttccctttgataaaggatacttactatatctctctggcttccttgccttctcagccatgatctctcttatatcctagctcccccagcatgcggcagggatggggggggggcagtgtaggagatcagccagggagctggttgccaggcgacagttgcctaagcaaccccatcctctccatctccatgtgctcagggctgctccttagaagacttagagtctcaccctttgcaccagtagagctgagtgtagggagcgatgagggtgagggtggcagggttggttggagagtcggtgatgtctgaactgataggctttgagggcagctggtagaaggttctaactccacagagaacagcaggacagacagagattagactgcaggaaggacttctacaggctcataatattttctttgtacgggcaatagtatagtaaaaagacagattcaagttcctgcttcatgaagctttaaccttagtgaaccaggcacagaagagaatcacaattgataatgttagaaagagtgttgggatagctttttagtaaactgaaaacactaggacagttcactctaacttgcctgaggagacagcatggaccataagcaggcagagaagttctgtcttcaagaatctgttcatggtctgggtggtgggtgatggtgctggtgctggtgctgcacacctttaatctcagcacttgggagacagaggcgggtctgtgaactctaagttcaatgtcaacctgatatgcagagtgatttccaggtcaaccagggctacactgagaaactctgctccaaaaaacaaagaaaaacaaacaaataaaaagagtctgttcatggtctgaaggtggagagcaggaaacaagaaagggacaagaaggaagacagccacctggccagtggggagtcagggcaccctgcattgtgggtcaagattggagtttgaggcctggagagatggctcagcagttaagagcactgactgctcttccagagctcctgagttcaattcccagcaaccacatggtggctcacaaccatctgtaatgagatccgatgcccttttctggtgtgtctgaagacagctacagtgtactcatatataataaataaatctttaaaaaaaaaaagattggagtttgagactgagccagagaaacccacctaaagaggccaatttaccatagcccttgccccagtgtgcccttctccaacccccagcccaaggagggcagttgtgggtagctctgagacttaggataaagcctggaagtcctgggtggagcccctacagtgcattgggcaaggatttgggtcacaggcccagagaaactagagcttgtttgagccacacagggctaggatgtggggcgtggccagaggaaggcccggaactatggagctcctcagaatcagaacaagaggagagatgctggttccctcttttggttaccttctatacatgtagacaaattactcttccttcagggcaaggagctgagatgctctctgtagacgcttaggctgagtggaagctagacaagcccgaagggaagttctgtgatctgtgatgatcttaagcaggttcacaccttcccttccccacgccatcatagtcaggtatccagtgaactaaccactccacttcctctgtaaccttcaggctttgtggaatgtgtctgttcaccatgtacgtgcagagtctgtggggactggaaggtgacatcagaccccctggaactggagttacagatagttgtaactctccaaatggatgctatgaactgaacccaggtcctcgacaagaccagcaagggctcttaaatgctgagccagctcttcagtttcctgttcccctctttgcatatccctccactccctatctacttacttatttatcccatttaattattatttttatgggttttatttgtgttttgttttctttctggggtttgttttgtcaaggctggggtctcactatgtagaccaggctgacctcaacttactctgcctctcaagcactggaattaaaaaccttagctaccacacccacctcctttcccacagtctttgtcagttaggctgcttgccttgcctgtagcagagcttaaacggtgcaaaagaatttacagcctgcagcactgactctctgacccttttcagaaacacttacctgaatgggggtaaattccgcagtggagcatttacctagggagtgtgaaactttagcttccatacttggcactgcaataattagagaaaaaagccagacttttgtgtagacctgtgaccataggttattggaaggttgaggcaagaggatcacaagttgaaggccagcctaggaaacttaacaagatcttagctcacaaaataaaaatgggggttgaggatgcagctgggcagagcaccttccaggtgtgcacaggactctgggttgagtccccagtgtgaggtgctctgggaaatacacttgctgccctctggcctaaagcagcttgtctgtttctaagtggcagaacacccttcaaacagaagtgttcttggcctgagcaaatgaagtgcactaatgtccagacgctctgactagggtgtgcattctgtaattccacattccactgtccccagactgacaacctggactggatgccaggtaccaatatatgcatccagcatcctctctctgcttgttgcctgtagtttgggaaggcattagctcagtatcttctcactttgtctccaacataggagtctccactggtacaggctgtggtagtggtagggggttgggagtgtacagcacacagtacagacaagcttcctaaagaacagggtatgggtgctctccaagaagcagaccctcagagccctatatcttctgtgtgacctaaagcccaaggacagcagtgacttggggaatcaacctagaccaagccctggtcccagtgggagcccagtttgtacctggtatgggaaggggggcatttcctctatagccaatattgttgcaatttggggatggggcagagatgccaccagtctctcacaggctgtaatagcctggcccacatcccaaacaaggctgggggttgggggtctaacagtcctcttatgaccccttctaggaggctgtgcataggtgttctgcagaccatgaactgagcactagtcccagacattcatgagcacagtgtgaggctcctgatcaccacccagcagccccttcctctctggcactaaggacccctggagaagatggggaggaaaaagattcagatccagcgaatcactgatgaacggaaccgccaggtgaggaggtcccagggcccttgtggtaggcgagcaaggacagagagccaactctgacacccatgaccagttgtaaaagagaggtttcttggaaacccagggactcagtgacggttccaatagaggatgggtccaagcagagagaggagcactttgtgtacctctttggcttgctggcctgagatgggccaggaccccacaccattgccacacctacagcttcctcatctcagcaagagttctccccctcctcaactggtaggtatgctgctcttcttagcccactgcacacagagacgtggtggcctcctttcttggctgaggctggctctggtgctattttgttcctttctagaccatggatttccatcaaccatggctgagtcaccatgagtgtagaactctagggtagaggctatgtctatgggcagggggactcttatcagacctggccacccactactctcctgcaggtgacattcaccaagcggaagtttgggctgatgaagaaggcctacgaactgagtgtgctgtgcgactgtgagatcgcgctcatcatcttcaaccactccaacaagctgtttcagtacgccagcaccgacatggacaaggtgctgctcaagtacacggagtacaacgagccgcatgagagccgcaccaatgctgacatcattgaggtgcgcgcctgggcccacctctgctcatgtgtaaacctctcttttctcctgaacccagggtccaaggaaggaggggtctgacagcaaaggcatgagtcatgtagccagcaccaggcctcagctcaacttaggcatgtggtctaccaggtctgaggagcatcctgctgtcttgtgctttgggctcctccttccttcattctctgtgatactccttgtatctccctctttgttcctgtctctcagttctgttcctttgtgggtttgtgtggctcttgtcttgtttcagggtcaagatgtgaaatgttgaaggatatgagctttgggatgaatctctggccttttcttgccatgtgaccttaggcaggtggtctggcttctcttggctgtggtaactccacagatggagcaatactggcttaaagaagtgttctgtgagcaaagagatgacctaattcatgcttctcacttcaggttgccaacttggggtgcagaggttaacaacactggctcttttccagtggacctgagttcagttcccagcacccacatggcagctcatgaacgcccgttactctagttccaggggtggggtccaccctcttctgaccctgtaggcaccaggcattcatgtggtacacatacatgcaggcaaaacatatatacatgagataaagtttttttgttttttttttgttttttttttaaatccagacagtgatggcacacacctttgatcccagcactctgtgagttcaaggccagcctgatctacagagcaagttccagaatagccagggccacacagagaaaccctgtcttgggggaaaaaactacacaataaataaaattaaaatgaagcaaaggctggcaaaataacttattaggtaaaggcacttgttgccaagcctgatgacctgagtttaattctcaggaaccctgtggtggaggaggaaccaactcctgcaggttgtcctctcacttaccacacacacacacacacacacacacacacacacacacacacacacacggacagacggacagatagacagatggacagatagacaaatagatagacagataaatgtgatttgattaaaaacaaaccaaaacaagtcaggtatctttggtgttctgagtgagcacaggtagcttgagtctggggtagtataaggcaaaaagctcagtgagtgagtgaggcaggtcctttgtacttctgtatcctttcctgtctcccttcagtttctctcacctaagtagaacctagggtttgcacgggcagagtccccacccccaaacacactttctagggagctggctgaacctggcttctccctagacagctgtggagcatgcctgccccagggaacactgtagggacgggaggatggctggggggggggggggaggactagaacatctgggaaccatgggagagaaggttggagccaagtaggggatttggggaggagcttggaggaggcgggaggaccattgctggctggctgactggatggtgcggttgcagaccctgaggaagaagggtttcaacggctgtgacagcccagagccggatggggaggactcactggagcagagccccctgctggaggacaagtaccggcgggccagtgaggaactggatgggctcttcaggcgctatggggtgagccctcctcaccttttctctggcccccttccggcccctcccccaggcgctgcacaagaagcacagggaatgtgagagccccgaggtggacgaggcgtttgccctgaccccccagacggaggagaagtataaaaagatagacgaggagtttgataagatgatgcagagttatagactggccgtgagtagtcatggaggacagcctcctgtgctgcatggtgtggcttcacccagccctgcccggcctcggctgcctctggtggatgtgctatgctgagccatccttgagctggtactgagcactgaggagctcctggccttggtcttgatagcccccttcttgcataaactagagagacctgcagtgtcctctcactagcagacagtgcaggtgctgtgagtctccagaaacggagaggaactgttctttgtcccattatatgggggacccccttggggtgctttggcacctctgcttcagtcactcagctttgtgtaaaggaagcagaactgctaaagggatggcagagaggtgggcttgagctgctcccaaagcaggccagatggtggtggccacctagtgaagccatatcctcggtaatatgcaagtttgggtctgtccccagggcactaacttgctcccagtgtgtcctgcctggctgaggactaacccacctccactgggggtatccgatcccatctgcagtggacagagcctggctctctcaccttggatcagagctgtagcaaggtgctctcacctttctgatgggaggtaggcagggctaccaaagggctgaaggcagggagcccaagcttctggcctttggagatacagttcaggaaccaaagaactcttgtgtctaccctctcaggcaaaaatgggtcgagggggagagattcacctggtgtgacactaccctccatctttctgtctagtcatctgttccggcccccaattttgccatgcctgtcacagtgcccgtgtccaatcagagctccatgcagttcagcaatccaagtagctctctggtcactccttccctggtgacatcatcccttacggacccacggctcctgtccccccagcagccagcactacagagaaacagtgtttctccgggcctgccccagcggcctgctagtgcaggtaagtgggctggaggggagtcactgaagtggaagttgtgtgttgaaggggctctgggcttctattttcaatggcgggtcttccctttgcagcatttctgcatgtataggactcttgaagggaaatggcctaggactcctcagagccccctcttcttgtccagtccccaagacaaagctcatggtagctctgcttttctcccaggagccatgctgggtggagacctcaacagtgctaatggagcctgccccagccccgttggtgagtgtagctgcctccgtagggtggctcagaccagggacctaatggaaagggaggaggatgatagggccaaagcaggatgtatcagaggactttagcccaccaaaccccctcttgttttctttttctagagacaggtcttactatgtagccttgctggtctggaacttgctatatagactaagatgccctcaaactcatagaatccacctgcctctgccttctgagtgctgggatcaaaggcatgcaccactatgcctggccatggtccagcattttcagattaaaatgggtcatcttgttgggatcaggacttgtctagacaaatggtaggcattcaaacaccacctgtacacagaggccccatgctcctatggagtcactatacagatgtgtacctgtaggcctacatactggagtcataggaagaaactaccattgcccagacacttgtagccgctcttgatctgtgctggtgtctgactagtgacctccttttaatgtcaccattgacgtcaccctgtcattcttaccattcccagagtgatcttggagttgggatagaaacagcaacacactgtgaggataaccatgtgctcttaggggatagagaaaggtggaatttagggatcacccacattcctaaacctcaggctctttcagctcagtctcggccagtacttcccatgtcctgtcctggtcattatgggccctgtgtgaggtcggtgggcgtgagggcactgtagcagtggctgtgcactagagtcacaaaactgttgactaaaggcataacccttctctccaggccttgctcacacagccctagagcccagcattgggctctctgtgagatgccctgggtggttgtggaaaagtcttcacagctctcagctagtgtcatgcttcctctagtgtcatgtgcccagaactgacaaaatgtccatcctgtgcccctcacagggctgatgtgaacatgtatgatactgtgtgtggaagacctgtacatggcagattgcagagcaaatgtaaaagttgtgatgcctttttcaccggctctagttataatagtgaccatattgtcagccccagtgccagcaacaccattaccagcagtcagcgccctttccccatggtgtcaggcaacttgtcttgtgctgatcaaaaggacagagttttagctcctgacaaggaaacaatctaaatggttggctggctctggtaatctggctccttaatgaagaccagatcacagccggccaccttgtcccactcctgtcattgtgtgtcctctatggaacagatgggggtgtctgagcaccaggcatggggaaaagcatggctgcagggctctctcaagtgcccggggctggcagaggcagtggttgcttgtcatttctacctctggtcccatcactgtggcttagagactgactttatgtcaagtgattggggaccaaggctttggcaatgtcagacagttcagcatccatgtagagcctcaccaggcctctgggagcctacaggtggcagatatgctgtctggggcagctggcaggtatgggggcaggctggcattgttggttcctcatctcacttctccagggaatggctacgtcagtgcccgggcttcccccggcctcctccctgtggccaatggcaacggcctaaacaaggtcatccctgccaagtctccacccccacccacccacaacacccagcttggagcccccagccgcaagcctgatctgcgggtcatcacttcccagggaggcaaagggttaatgcatcatttggtgagtgggtttttgggctttggcaggggctgggaggtgggaagaaaagcaagaaaatgaaggttagtagcaggtaggacttttgagagagaaagacagcatgactttgaacactttcttccctgagggtctttggaccacagcagtgctgaccagagggcagtataaatgaacaggagataggagaaaaggctcggtattagagaagatgatagaaggaacccacactgtaccatgagaataagcactgggtgatgatatctggctggcggaggccaggatgcagcattttatggctatcagatagaatagatgtccttttgggccagaaagaacattctgctcttaggcagataggggaatggggtggccgcatgggaagggcaggagccatagcctgaaccatccttttggttttatttctgctcccagactgaggaccatttagatctggtaagtgtggctgagatgttaaaagtgtctttgagttccagctttgcctaatgttactctgtctgcagcatgagtttgtgtacctgccttctccctgtgtgtttaatgtgtggttgttaccaggagctgtgcatagagctgagtggggtactaaggtgaatggataaggggagggctggacatggcatgcacatgtcatctgcgtgtgcacggatgtctgtgtatcatcatacttgttcagataccaatacgtgtatgcatgtggaaaagagtatgagactacccccaggccttagaggcctcagatagatgcctgaattaagctcttagtttccattggcctcctgaccccacacaacattggaacccaagacacaaatccaatccttagaagaaaatctaggaaagtctgaggcctaaggcagtcagtactgcagttgtccttgccagcctgttcactcacctcctaccccgaacccatctcacagacacttagagacatgcacatcccctcctgtgcttacactcagcagcagccaggaaagaggagggtgcttcctccccagcttgctgacaggaggccagaaaggctggaaaaggcaagcaggctttggcggccaacacaccggcagtttcggccccagcgtggagttggataaacaagtgactcagcagcagatggagctgacagccctgcacacgtgtgtgcatacatgcaatcacatgccaccccagatcctacgtttcattcccagatgccagtagacatctcttgaggcctctgctactgtaatgggtagagatacttcactggtcttagcccaagagagaccatatctcttcctctgtccctccacccaggtaccagggcagtgttcacattaagctacaggctgcccccatgccttcctgtctgtatgggtgcagatgcaagtgaatctgtgtgtgcatgtttttctgtgtgagtcttgaggattccaaacacacgaactgtgtttgtgagtctgcgggcttccatgctatgatccctccccttgggattcagggacctagttcagatacagtactgttgaccaccttgagacagccctcccatttgccatcttttgacagacagttttctcctacagaacaatgcccagcgccttggggtctcccagtctacccactcgctcaccaccccagtggtttccgtggcaacaccaagtttactcagccagggcctccccttctcctccatgcccactgcctacaacacaggtgagtgttcatgtaacttggtgcattgtgcacgtgtgcatagggcaggggctgaccagagacggtcactggatgctccttccaatctgaggtaggtccttcactaattagtgttgtaataattagtagatcaaacaaataaaaacagaatcctgggctggggggtgtggttcaattggtaaagaaagggtttatctcacaggcatgaagccttatgcccagttgctcgcactatttataagccagatgtggtagcacttgtctgtaatctgagcacccaggaggtggaaaccagagaatcagaagttcatcatcaccctcaactacacagggaattaaagtccagctcagttacttgaggcattgtctgaaacaacaaaacacgctcaagagagggctcagcagttaggagaacttgctgcacttccgagagtccaagttcagtgcccaacacccacactgggttactcactacttgtaattccagctctaggagatccaacatcctcttccagcctcttatggtacctgaccatatgatgtggcatacatacaaacatatacacatataaacttttaaaaaagtttataaacagaaataacaaaattcttgatttgaactttggatgaaacaagttctttttcagtcttaaatgtatccccaaggcattatttgtgctaaagtatatcccaaagacatactttcttttaatgcgttgttaatataaaatttactcttaaccaggttatcttttatttttaacataggtccttgtggaagagtagctcctatccagtgtgagggggacaggtcagaggtaacctgagtagatgattcaggcacatcaggctaatagggtcctggtttggggactggggaagggaacatggtcagtgcagcaaagcttcctggatgcagagtggatttgctagtttcctgagcagagatggctcagtgcagcagtgagtgggaggcaggataagcctggtgatggttggtggctggataggtctaaaggtgaacagttacctggggacatggcaaaggcctctgggtagaactgtgagacatatagtgcaagctggcatggctctgtcagcctctcacacgttccagaacagagtgtgatgcccacagccggccatccttggctgcattcaggctgctgtgtctggccaggaaggactctctagtagggaaatgctttgttacctggcctcaaagctttcatgtggcagtaagctctgtctcaataaggaggcattcctcatccctttcccactttcattactgatcctcacacttgagtggccagtgttcaagttgttctatggtgactcttgtacctctgcaagtcctttttgatcagaagcatgttaaggtacagatcccacctctgccctcttcctagcagcaggagatagcctgagtggcagacagcagcctgctttgtgcctctgcaaggaccaagatatcaatgactctgggcagatttgcctgctcgaatgtctctgaccccagttccttgggtgcctcacatgcatacccactcccaggttactgattttgaggctggggaggggctgactgcttcagaagtggcagcctgtgggcctagttcagggaacataagtaagagggagatgaggctcccccagcctgttacccactcccaagacaaggaaaaaaccaacttcctgagtctaatgggaaagtaggctgaacacagctcagatctcctcagaagctttgtttgggaatcctaccatggtggctacctgcacttcccccattcagtcttgggaagcaggagagaagttagtttatctcagctctcttttggactactgtgtctctaggatgtgcaagcaagctttggccccgagaaagctccagttcctgttgctacaggagtagctgaggagacttctgtcagcagcagacatttgcgggtaccacatctgatgtgagccaagctccagtaggtgctgggtgatttactatggtgatatcctgctccagaggacatgggcctggcttttgtggccactacctctagagatctgtctgtggtgacgagagcagcttaaagaggtagccagatggcctgaaggttgatctcttggtccttaggaaataagctccccagtagatagagctaatgtgctggggttgggcaggactaagagttgggttctgatttctccttgaggtccttaggtaatgccctggcctattctgggcctgattttgtttgtataataagcattgaatataattagtcctagaggccacattttgcatttatactggtttttaaaatgagtaagggggggagggtggctagagagttggctcggtggttaagagcactggctattcttccagaggacccaggttcaactccaaacactcactagtggctcacaactatttgtaactttagtttcaggtgatctgacaccctcacacagacacatgctggcaaaataccaatgcacataaagtaaacttttaaaaatttctaggtggaaaaagactttaaagaaataaataggtagggctggggatttagctcagtggtagagtgcttgcctaggaagcgcaaggccctgggtttggtccccagctccgaaaaaaagaaccaaaaaaaaaaaaaaaagaaataggtaaataaataaatgaataaataaataaataggtaactggcattgacctaaagtaagtggagtgggctgtggtgcaggtaagatcagtggtgagtgtgctcagcaagtgtaggactgccttccatgcccagcactgcagaaatagaattaaataaaggaacatggcatcagggctcccatgggtgctgccactagcctagcctttcctgtgagtaggcagctcctcagacctgaggctacatctgtctcatgtgagcagtggtgcttggtaagtcttggattgttcaccaggagcctgatgatgttgctgtcctacatggcttttccacacttgcttttccttggtggctgtgctgaggtgtatctgctctagacagtcagcacttgtctaggatctcagcctgtgagtggaggttgccaagaatctgtcctcatagcttcagcattgaatgctgcagaggtcaaaccatcttcctgcacaaacagggctagagcaagtgaccttggattcacaatggaacataggttgggtgcctggacagtacatatctttctagcatgtcctcccactgtgtacacatctttatggctcttgggaaggcatttctaaatacctgaaacagagaaaacagcaagaggcatcctggagctatataaatagcaagtgagggacttgttgaggggcagaggtcaaagtgtcttaacagtgctgcagacatcacagtgccttaatagtgtagacgtcacaatatctttagatcagtgcttagacgggaagtgtcccaagtccccaggaaacttggccacttggccctagcttaggccctaaatgaggcccctttctgcctcagggccatgaaaactgggtgtcagacccatttcctctgtgtctctctgggagcctaagccctggttagggagagtcaaggtatgtggggccaagacagaagggagagtgtttggggcctctgtgctttctggtctcagtatcctggagttctcagagctccctgctgcctctcctcagcctggagctgggcaggtgaagagactgcagttggatcgatactgggccttctccatttcccttgcccatttcttttttgtaactgcccttatgaaagcaatacttaggcatgattgatttttaaaactgatgatgtcttaaaaaccacttgtcctttaccttgtttaaaaagcatgcctgtgaccatcaggcttgtcttctgtcgtttcatgaagtctccattcttcacgtctgtgcttagacaccacctgtccccctgaagggctggggaggtgcttccacccaggctccctcctttctcttactgcagattaccagctgcccagtgcagagctttcctccttaccagccttcagctcacctgcagggctggcactaggcaacgtcaccgcctggcagcagccccagcagccccagcagccacaaccaccacaaccgccacagtcacagccacagccaccacagccacagccacagcagccacctcagcaacagccccacttggtccctgtttctctcagcaacctcatgtgagtctttgggaggctttccatggggacggtggggagtgagggacagaaggtctccttggagttgtgtatgtgtttagtaagtggcagtcgtgagccctctacccagccagcagagctgagggtgtaggctttagaagatggacagagtggtgtggacagattgcagctaacactcatttctcttctttccctttgacatgcgtctccctctctcccaactccccactttcattctgttgtgtttccctgtctgctgacttcttcttgctatttgttactgtccctgtgtccctgaactccagccctggcagccccttgccccatgtgggtgctgctctcactgtcactacccacccccacatcagcatcaagtcagaaccagtgtccccaagtcgtgaacgcagccctgcacctcctccaccagctgtgttcccagctgcccgccctgagcctggcgaaggtctcagcagcccagctggaggatcctatgagaccggggaccgggatgatggacggggggactttgggcccacactaggcctgctgcgcccagccccagagcctgaggctgagggctcagctgtgaagaggatgcggctggatacttgggtactgtaacattgcccttctgtctgccggtgtctgcgtcacccagggatgccccacatgcacatgcctgttttctttcccacctgaggccttgtggccaggcatttcttttgggtcagtactcacagccctcgaccccctccttgcagcattgttccctgctcagtgacctccagctagcctcaccctagagtgtgacccctggggagaggggtgggtgcatcctataggccacactgcccctcacaccaccttctccatctcctttcttcacagacattaaagtgatggttcccactcccatctctcagcctccctgatgaagagttgacaatctcaccgcccacccctccctgtcctgggctcctcccgctcgaccccacttcctttcttctgctccatgtcctgttgatggttacatttgtgtataattatattattattattattattgttattattattatatttttaaattcaaattctcgctttagagagagggatgctcttgcccctttcttgctcccaccattttcactgatgggggactctctttattgcgggaaaggggggacactttgcacgttgtacacatatgctgcaggaagggggggaggcggtaggccttggagaaggacaggtgccgagccctgcatgtggagccctcccatcccattcccagatagacgtaaagaaccaaaaactacccaacaacaaaacccagacagtggactgaaacccaaagctggcttgatgaggggcttgtgtctcgggatataggaggaggtggagtttctgcttctgggcagttcgtggctaatacctatcctggtcccttcagcttcctgcatacatactgcactcactgatcctgtgtgctacaccccaagatctgggtgatagaaaggctgcctaggattctgaggccagggcaagggcttgaggtaggaatctctagaagaaactgtggagagggacagctgtagaaagagagctgaggaggacagaaggactgggtgtgatgacttgggaccctacccccagcttttcctttaagatgtacagtgcaatagcgccccatccttcagcctaccccagccctaaagaaagctggccatgtcctgggagagttgggagatgaccttaagtgaagtggctccaggtgggccagagtcatcctggggcactgaagtcaggaggcctgtcaggggctttgtgcacctgtgtccagagagtacacactaggcacatggcatggtctgtggagctagaggctcctgtagatgaggcccctagcccttccccaggcctctgagctcctgcccctgccccacctcccagctctctttatgccccttgtctcgctacctcctgtccctacacctccaggccacatcccatacctgccctcttgctactgtaattgtaaatagagacctttcaaatgttagtggtgtaacagtccaggaaactgttgtgtttgttgttgttgtattgatatgaaatgagattctatttttgtcaaagtatattgtaataataatgactcaaatggcccgtcctgtacagatgagattcttctgctgtgttcttgccttcctctcccagactcatgctttgtggcctcctcagtggggctgcagcaagaccaggggcagtggaagcattgggtccttgggcctcttgctggatctgaggtcaaattggagggaatagtctgccccctccccagcctgctctctgtcaccatccctgcccttcctctgctttcccacccaggaaaaggggatgggagacagccacacccccttggagctccctcccagccggagggtagagttagacaaggctcagtgctgtagtaagatggtctttgcccaactatgacccagccttttgtagtatttgacacttgatgcagggaaggagccagaagcagaggggtgtgagcatgctcgtgggggcgtatctgggttcaccctgtatttatgtgtttgtgtgcagctgtgcggatgtacctttgagtgactcaagctccaagggcctctgtgtctgtgagctggatgtgtttacaagggataggcagcttccaactctgtggcttcactcccctccctgggctgctctcagtcccaaaacattttactaaagtttgggggagggagtgctagtcggccttcctcttctccccacagcctacctccaccagggcttcacatttggagctctgcctccatacggctgtccactagccccacccagtcacagttccatccctggagttctgacttgtttatggagccaactcaagttcctcttcctcctgggagctttgccttccatggggcagggaccgtcccttacccagagttttgcccccctcctcagttcctagagggaagttttgagacttgcttacggctttgaaagaagccagggtgtagttctgtgctccccttgaagtagctggcacattataggcccttagtaaatgctgaatgggttgatgacaggtgctcaataaatgtggaatcacggcttcatctcaggcctatccttcctggactgagtttggccaccattatacacacagctgggggtgaagcccctatagttcacagtgtgctattcaacagtttgccatctgcttcccgaaagcaaacctggcttgtgattgccgtgtgtgtgcgcgcttgcacgtgggtgtgtgggtgtgtgggtgtgtatcacacacacacacacacacacacacacacacacacacacacacacacacacgagttcctatgtgtctctgtccctgacagtaggggcagtctatgaatgaatatgtgacatttctgaagttcagtatctccaggtttctcctggggctatgtaggggcttctggctggccaggtaaatggatccctgggaacccagacctcaaatggggacttactttcttcctctcacaagccaaatttgcctcctatccactccctctacaaaactgggtatttgccaaagtagcctctggcgtcatccagtgcccttcccacccaggttcccctccactttcagggatagtgggactgagggccacccccacatgcctcaatggaacacatttcctccatccccagcagtgtatccacccatccctcccccactcgaacaggaaggaagaaatgcaccttctcttgctcattatttatttgtttggagagacaaaaatgatgggaaagtatctaaaaatctctctctctatttttatgcgactctctggaaccccctgtgggggaatgtcagctctcctgaaggctgggagctcctcattctgccctgtctgcctctacgtaagcggaagggatgggacataatgggacaggagggctgattcccaaggagaatctgaattctctaccccattcaatcccagaaagagggaagaagggagggatggggccagccaagagctgacccacccccaaacttgacaatcacccacactcctgactcctgggtcttgggtgagtccaagtgtgtggctgttgatttgttttcattatttctttctgtgctgtacggtgatgctttctagtattctgcacattcagaaaagtcctcgagattcttacgagtttggtttgaaaactctttcactatatttgttgtaaagaggtttactattaaaagaaaaaagaacatgtttctgatacctca

SEQ ID NO: 1064 - DNA, 32306 bp, synthetic construct
  misc_feature 1..32306: note = Synthetic
  source 1..32306: mol_type = other DNA
atcagagagcccaatggagccttctgaagtacctagtcagattagcaaagataattttttagaagttcctaatttatctgactctctttgtgaagatgaagaagttactttccaacctggtttctcccctcaaccaagtagacgaggttctgattcttctgaagacatatacctggataccccatcttcaggtactagaagagtttcatttgctgattcctttggattcaatcttgtgtctgttaaagaatttgattgctgggaattaccgagtgcttcaaccacttttgacttagggacggacattttccacacagaagaatatgttttagccccactgtttgacttgccttcttcaaaagaagatcttatgcaacaactccaaatacagaaagcaatactggagtcaactgagtctcttcttgggtctacaagtatcaagggtattattcgagttttgaatgtttcttttgagaagttagtatatgtaagaatgtctttagatgactggcagacacattatgacattttagcagaatatgttcctaattcatgtgatggtgaaactgaccagttctcctttaagattgtattggttcctccttatcaaaaagatggcagtaaagttgagttttgtatacgttatgaaacttctgttggtacattttggtcaaataataatggcacaaattatacattcatttgtcaaaagaaagaacaagagccggagcctgtaaaaccatggaaagaagttcctaacagacaaataaaaggctgcttaaaggtaaaatcaaggtgaggatatatcttacatattttattattcacaatcttaaagtttttatgtcattctttatttcatgtgttgtaagaaagtgactctatttaaaaatatactgcttgctatgtaaaaaacaatggtgccaggctttaacaaggtcaaagctattcaaataatagcactgtgtaaccctttctacaaatgtgagaaaaaatatggctgtaatgcaataggttgggagagaagtgcactgtgtatattacttgcctaatgagttataaattattcctgctcaaaccatgaaatctagattattcacatataaaattatttactttgacatttaaagtacttttattttcagtcgtttttaaatgtctatgctttcctttgaaacagttttgattaacataaaactatatttcaatatgtatctagttctcagaaatttgtaaacttctcccaaaagctgcaaagaacttcttcataactgttttgagttatacagggatgtttgaagtgatacatgttaatttaaattataaaagaaatgaccttaatgattaacagaaagacataagtatatcagtgatatatgagttacacacaaaatttcattaattataaccaagaataacattatggaacacaaattagtataatttagtaaaagtcaatggagcagaacaaaaaatgacccaaatataaatagggatattcagctatatagattagagatttgggatgtgacccctcattagtaaccttactctcttgttaatgtgaaaaataagaaaaactggcattcagctgtctcgatagtacatagctggctaatttctgtgacactaggtaagtagagaaaacattcaggagaagtgagaccccttctgctcctcagtatcccagagggaaagtctacattgctccagccacaggcaaatgtttgatcatcctctgagtggtccatcttaactgtccctaaacccaaggattttggtaactgtaccagaaatagtgtaatgtaggaaataggaaatataggaaataggaaagggaactgttttggaatcaagacacccagatttaattctctaaggggaatttaatacaaagcataagatacgatattgggaaatttttttaaaaattgtgctttaaacgataaataataactactaaatgcattgttccaatgtattaataaactaaatgcagtatagatggaagcaattcaaacatatatattatgtttattttcattttcctttaaagtcatctgaaatattggcttaatcaactttgtgaattaggccaactttcttggtctaaatcaaactttctttgattttaactgatgctgttaggaaagagagtataataatctctacataggctaaaataataatttagatgtttatgaaattactctaacacattagctacactaacaaaataagttcaacattatttagcaaactaatttatatgcataatatatacatattaaatactttagaaatgagataagcattagtgaatatctgttaaacacactgcaacttgctctatatgttagagaaaccaaaatttagaaaaggcgcagcattattgtctaaaagctcataaaagaggcagtgttgaactcagcggatttttctgcaatttaatgcagttttaaaattcaagcaatacctgctgaactgtggtttggataggggattcctttgattcctttgatatgccaaacttgactgataccaaggcaaagactagccaactgataggcctcatcttctaccttggtcataatatttttggaacttctcctagttgaagatatgtagaactatatgtatccacacatacatttgtattcagaacagtaatcattggattcacagcggacaccattcaagttttaatattgctttggggaaaaacctgagaagaactaaaccacaaaatggtctgaaggcctgtaaagtttcctaatgagttataaaaatggaaaaaatctctctccctcaaaaccacaaatacattttctgcacttctgtaacttaaaaatgaccaacataattcgaaccacattttgaaaaaagcatttgcctctggaggaggcattttgtgctgaatttcagtccaacatgaatttttacatctgatttatataccactcaaaatggagtgtataaaggaaatcctgacagatccttagaacagcatgtgccataatagaatatttatacagcttttccatgatataatttatatgcaatggggtttcaaatattcctaaaactcacacaagagagcattatcaaatttctaaatgaatattgcagttggattttattgtgaagagtttggttagagaaaaatagcacaccttatcggtgttattttacaaaatgtgtacttgactaaaataaaaatgaactaatacttatttgatcaaaaattatagctactaaaatctcttctctccaaatagttacagaatctaaatgggtcatttctgagcatttctacacttcctatgtagcttaatttggaggttatttctttcagaaggtaaaaacagaatatatatatgtatatatatgtatgtgtatatatatgtatatgtatatatgtatgtatatgtatgtatatatgtatatgtatatatgtatatacatatacatacatatatatatatgattttttctttatacctgcaaatagattagtaatagtatgtaatatcagtcatagctaaaatgaaaatcaggctgccctagtgtagagaataacagctaacttcaattcttcttaataaaaaagttaatttgctatcagggtgcctgagattgtatcttctgaaagtgtcaataatcccttctaataagtatggaatgaatgaatgtggaaatacatttaggtaggatttctgttaagtcaatcacccacccaggcattatgttttctctatggagatttttctcatgttaagagtttgcaaatctccacattggtgtgggttgtctattttcttttgatgcctgatagtctgtacactttggacagaaagaaatatgtagagagaaggggaggcagagcttgtaactcataggcatgtgattgagagtgacccaaagatatttaattgcaccgaaaggcatgcatcatgagatacttaagtatcaccacatatgctagcaaactaagcagattcctgatatatctgatgggttttattttaaaatcaatgacaaaaatgacattgatataaatcacattaaatgtacatagacaaataagctaaaatggcatgcaaaacaatataacctcaaagttaggattttaggcttcaaagttaaagatatctgagtttgaatccaagctctcctacatgctagcaatatgaacttgggcaagttaagcttgtttttctggtatgttaattgagaacaactacagctctatctcataggggttgagatttcggtgaagtaatacatataaacttttagcacagtgtctggaacataataagttatcagtaaatgttaactgctgtaaaaagacaatggtaacttcagctttaggtgtatctgaaaaactgcaaggctcaagctgcaccaaagttcttctcctctttcatttcagggcttctaaattttcagctttggagagccattcctttgtctcttgcaagattttaatcaacaaggaagactaactgaactgtaaattttcttgagaaatgtgtcactttatatatgaattatcttaaagctggaagagaacttaggaatgttaaaatttccacatttaatagatgaaaaaatgaagaactagaccaaaagggataaaaaggcattcatttaggattgaacagacatgcatattaatttcagtaaagtttacacttagtagctatgtggctgtgggcatattacttcagagctcaaagcctcagtttattcacctgtcaaataagggtcatgatgtctagtgtcacattgattaaaataagtttatatacttaaagcttttaatatagcatgttagacacacatgaggatatcatcaaaagcccttcatcacaattgtcccttttattatcaaatcttgttcagctaatgtcctgactcttgaacttgcattatttctccatacatcataggtttccttgtttcaggctccaaaacttattcaacaaatgtttactaaagaactgtatgtcaggttctgagttgttaggcagcagtatcgataactgagaaatgtggctggagacaggcgcctgtgaagacaagaagaggccccaagggaaaaggccttgaaaagcagagagaaatgaagggaagagagaaaacaccaaaaccaagttcagattctctgggtatacagtagaagccatagataaaaaatgaaataagaattatttccacttgaggttttctagaatatgtgacctagagctgacactgtgtacttactggcctggggggtggtctcccttctcagcatcttggctttttttccccactgcctgctaaatgtatgttcctaatggctgggtacaccggttgagttcatctggttttgtattttattaagtgaaaccaatttattattttaagtaaagaaactgcatgatataggtgtttgatggtatttataacttggccaggtgaatgcaaataaagtcctaaatgactttaatgccaaaggagaaaattgattagtcctcaatttttgtactgtaggaaaaaaaccaggtacgttcaggaacaggaaagagagaactcctttctaaaacataattttaagaatacagagggtttatctttcagggtggtaaaattgtgaaaatgaggccaagaaaagcattgggaaatggggtctaagatatggctacattgtgtgtttcagtcagagctgttggattgtgagacttccttaatttacgcatacagtataatctggggtcctggaaatagtccaaagaggtgtaaatagccccacgaggcctttgggacctcacgtatgccataactaactcgttttgagtccacactaattgtggaagctgggtctgtttaaggagggacctctggcaaggccacgtggaaacataaaacacagctgtgcagggcccatcaggagggtgtttgaaagcagccagctggttgacagcgaggtgccaactggcttcaagtttccttggaggtccaccaaggcttcatggtttcctggttttgtggaaatccataccccatcctagactttccctagagtgattttgaaacttttctgagagaagaggaacaaaagggtatcctccttcagggtgtctctcatgctgtggctgaaaggagtcactatgaatgccatgcctcaaatggatcctctgggatctctgagagcctatccctccccacctgaagcccatctgcagcctgtaaaaataaagcagagcccactatttctgagccaaaaatgctcctggcaaaaaaagaaaagaaaagaaaaaaggaagaagaaaaagatggcaccgttatgaagtgggtcaacttagtttttcaccttcctccacttctgctaactgtgactctcatccctattccaggtttttacccctacccctcaacaggaaataatgcaggggaaaagacctcaagggcagatatctgaagtggatccgattgcccagggccctatcaaacttaaaaaatcctctataatctgacacctcattttgtaaccttgcctaaaatttacatatatgtgtttgtgtatatatatatgtgtgtgtgtgttgtatgcttatatatgtatgtacacatgcacacacatgtgtgagattttccttcttaaatggagacccctcgagggtggcaggagctatttcaatcttatacccattgaggtcagttgcacagaggcactttgagtttggattgagaaaatggaaatgtctgattttagagcagagagcactacagaatacaaggtagatttaagtacgttgtgatagggttccatagtagtatgagactcatggggtctgaagtacatgtgtatatggaggatggagaattccaaaaacattgaagcataatggaaacagcaagggctttaaagtaaggcaagaccttgaggctttaattctaactaattactatctgcttgacttggataaattatattttgtatctattttattcaagtgtaaaatagggataataatttctacttggcagagttgctatgaggaatacattagctaacacatacaagcatctattccagttgctgacattttgtagatactcaaagtggtagtattaatgacattggtgataaattccacattttccaatcttgtgtatggctagtactgtgcccaagattaacggagaaatgctgttttccctcatcattcctgctaccaggacccaggctaaaacaaatagtttcaaaattaatcatgttatggttcaataagtcttgggggactagccagggagacgagtatttatagcattgcttctatgggtaaatgatttccaaattttagcaacttctgggtcacacacaaaaaaagctttggaacatcacctgttcataaattggaaactgaggacatgtttttcttaaggtagttcttctgaagatggttcttttggactaaatatctgagttgattgcacacaattcaccttattatctctttatgcctatgaatagaagatgaaattgaagtttatataattctcttcttctaagaaaatacattatgcaacatcaaatttcggtcattcctctgttttaaagcattctatgtatcccacaactatacgaaaaggaatatatctcttttcagagtattatctctcaaatcttttctggtgtccattctgctgcttcaatagctttactaggttaactagcatggtagtgttattatctgttaaataaaaataacaactggttttgaagccttaatcatgccatcctgctgtttaaagatcttatgataaaaagatgaaaacaaggaatttgctaaatttaactgttatactgcattgctcagggacagagaccaattaaacaaacctgtcgtaggaaattctaaaattccctccacaccaagttactctgaaaatgatctgtctgtgttgtatatcagcactattcaagtcacaactatgaattgaattttaatattgtaaggtaatggttgtcttatgtgtagtcatggttttgatttttatttacaccttttgaaatttgcagtagtaaaaaggattcaagtaccctccccattgatatttgtaaattatactgaatagtgaaaatgcttttcctaattatgtgaaaacatttcttagcccattgacaccatcagaatatcatccgtggtatttagagaattaagccatggtacaaacctaacctattgactataaatctgtatgaataacctccagctgattttcatttctaaaaattactgtggatgtgttaacacaattacaaatcacatagagttgctaagataaatttcagtttcacaaactatatttgaaaaacaaaatatagtctatcaacctcaccttttgaagattaatatttataaataattttattatatgttaaaacaacttaaatcttgtaagtacttaccaatagaaaaattgaagttttaaaaagtcacatttagctgcagcagaaaatagattatattgttcacatataatcttaagtaggtgcataagattattgtgtttattgtatttagtatttagtgtaaatatagttataattattgtttccaatgttaatacagtacttgatttctgaacagtttttgttgaatccttttgtaggagagactatctaattctatcctttgcttttagcagtattcagaaaacacccaggtcaaatggttatatattttcttcttaatcatcttgatatggtttggctgtgtccccatccaaatcttaccttgaattgtaataatccccacgtgttaagggtggggccaggtggagataattgaatcatgggggtgggttcccccatactgttctcgtggtagtgaataaatctcgtgagatctgatggttttataaatgggaattcacctgcacaagctgtcttgcctgctgtcatgtaagatgtgccttcgcttctttgtcttccgtcatgattgtgaggcctccccagccaagtgaaactgtaagtccattaaacctctttcctttataagttacgtagtctcaggtatctctttattagcagtgtgagaacaaactaatacatatctcttgggaagattatgttcttcaataatgtgttctatcagaaaagttccatgactttaatgtagccacttacgttgttctgtctttagtcatttatttactctttcagttgaattaaatgttggaatccctatccttatacattaaaatcaagcaaaattatattgtttctctcacagacttctattttccatgtcaaataacctcaataactttgtttttcccttgaggtctgaattagttaactagaaaacaagtttgtagtgttttaatgcatacgccagagaagaaaaaactccatcatcaactgaattctcataaggggtgaatgacatcactattaccaggaccatacattgtcaacactgatggatcaggaatagcccaattggtcaacaggagtttaactaaggcactctccaagccctgccttctttgtttgaattctcagtgttggaggtactattattacagtatttcctctgggagtcagagaaggaaaggaaactttattttataaaattagaaagttaaaagtacttcagaagatcgcttcatttattcttctatcttacctaaaaagatagctatattagaattcttgaaaactgtggacaaataatgagcaattaagaattaaagttacactattttctagatacctaattttaaaataacatttctttccagaatgtaactgtataaataaaatgctgaacataactttttagccattattaatttcttttttacatttttattttattttagattcaaggggtccatgtgcaggtttgttacatgggtttattgcataaggctggggtttggacttccattcctcatattgtaaatgtagtaatcatgaggtggtttttcaaaccttgctcccctctttctcttcataattctatcgtcccctgtgtctgttgtttccatctttatggccatatataccaattatttatctctcacttataagtgagcacatgcagtatttgagtttctgtttctatgttaattcacttaggataatggcctccaggtggatccatgttgttgcaaaggacataatttcattatttttaaggggtgcatagtattccatagtgtatatatactttttctttatctaatccaccatcaatggacacttaggttcactccatgactttgctattgtgaatagtgctacaataacatctacgagtgtgtctggaaaagaaatgttgaataaatttataaaaataaaatgcagtttagacccactgaaatttaaattggtttacattgtatccttttgttttaaaaaggttaatattgtatctacaagcagaaattatttgaatatatactaaatttcttgactttgtgtgtatgtataattttaactaaaagctatttgttctatcaatgaatatatacagaatattggtacagccattccagttgattatttaggaaattaaacatgggaagcagtgtaatactgcccagttacactcaactcatccttgatgcaccgcttttttctgtggaaaaaatacacacacacacacgtgtgtgcacacacgagcttttcacttaacctgatctctttcttatgtgtgtgtgtaatccatataatgaagacattcttcagagagttcatatgttagctagtattttatattttctatatcggtaatatctcattccaagttaactttggtaaactgagttaagtttttagacattggcaattatgtgaacattcaaggcatttgcttgcaaatctcataaaacccatttagttcaacaggacccctagtgctactgtctatccatattatggaacttgctttgacctctgatttctttttttactttctttaatttaccagtatttctagcaacattttcccatgaaagagctaattctagagcacaacttttcctaaataaaaagttgctgtttgtcactattacatctgatgcaatttatttataggcgaagaaattaacacctagcaaaagacttaccagatatttttgtgtctggaagaaatagaacctttgccacaacgccctctatatctgtttagtcagcatgtttacaatggtggcatttctaggcagcctccaggtacggtctatttttttcaaaccataacattatattttatcattcataatttttatattttaataagtagttttattcccttgtgaaaagttcaaaaattattttattgtaaaacacttcagttaattcataggctactttcaaagctcatttattacatttacaccattttaaaaaaacaattatgaaactacatcttgctggccataatataggcagggtgatgggaacaagtatgttgatttttttttttggttaaattctggaaatgtattcccttaatcccacgaggtagttatagatgaagaaactgaaactcagacttttcaaggtaactcttgatgaaactgggattacagccgcttttgatgtcaaaaccaccttccccttcactactaatgctgcctcatcaggtaaccatttgtgaacagtaaaggatattaaatctcaataaagtagtgtacccttaatatgctgaaatgtaaatatttagaaagttcctccgagtttatgaatacaatgtgattgtaatagggctttcctggtttctgatgctactcatgagcagtagtgataaaaacaatacattatggggtttaacaatcctattaataataaaagattctgatttacaggtaaacatgaatacagccaaaaggatgtttttagagctttccattatgcagacactagctcttccacttgtgttcactgtttctattcaagccacttgcgtgctttgaaaacatttttttccttgtctcttactattccatttccaccttccacaggaacgagtttgatttttccctcttacttgaggctttcctaatgtctctaatttatccagatccttcctttctctaggctcagcatttaatgcctacatcattcatctggtaaatgttaaatattgcctatttctgcacttaagaacttgtacgtgtgacctttttcccaagttctttgaggtcaggaatggtgtattagtctaagtattagtccccatgtgaccaacaaaaacctttgaaaaactattaatgccaaatagttttctcatagataactctgaggcctaataaaatccaaaaagacttctgaatagttaaataatgaattatgttcattgtagttcaaatgatgaatgcatttattgttttcatgatttttaaaaatcagatgctccctatacatctccatctggatctccaagtggcaaattactttatgttccaagtcaaagttacatttatcccccaatcctatttcttcgtcttatatcttatattttgtttaagtcatagtcatcattcctgtcattcaaataagaaactttaatatcaaacctaatttacctttgccaactcctattctacatccatattatattatatggccgtggaggtgatgattgttcctttgatcaaaaatacaattattttaaaaattaagaatgcaataggatatacaaagactatatttacatatgttaaaaacaacagatagaaggggatttgtcccagcaataactgcatatttgttgtctaaattgaataaaaattaatagataattgaacacaatcattgtaacatcttgtagacagtctaaatttagatggtttctttcagttacaaagatatcaatgaaaaatcgaactgagaaataatatagtctgctacagcatactctaattgttcaacaccttcttcttttctatgacttctaaagaaatgattaattgcaccatcataattttacttttctataagttcaagtaattctaacatctcaaaagaaatatttattgatcagcctttggccttctttatgattcagaccagtgggaccagaacaagaaacatccaataggctgaataacaaaagaccaaaggtagaaattctatgttcactgatcagaaatgattcacttacctttttcttcttgccagggccactgctcatattagtgctgacgcttatgtggtcctcactgatgctggcatccctagacactctactagttgtattccactgacatttctatcttgagattgcagagtcttggtccttccctaaatgaaacaaagagcaaaacaaaaacctagaaccagtgagagtaatgcaatgcatctaaatgtttcaactcaagacctacaaaaatttagtgtgatgtgtctactacactctattgtgtactacttaaaaggtattttaaaatggtttttgataaaattttagatttatagaaaagttacaggaagaatagaaacaattcccatattcatgtatataaatgttttaaactgtgtaacagaggggtctatttgcattgattattgtaggcaagggcttttacttttgtaaactttaagcaatgggaatttttagtttgtagctgattgctgatttcactgaatataaaacatcttaaatattttgtgaaaatattgacaaactcaaatggaatagtactatcaggcatattataacactcataactcttaaaattataatatttttatgacaagaattggaaacatattttaggaaattagggtgaagtctaaataactatgtattttatatagcaaaaataatatattccatctattatacatcaattaattcttacattactacccttaatcctcatagttttcattaagaattctactataatttttcctaatactcatgcgaacttcattgtacaaaagctgaagtctccacccaaagtaaaaatgtgttgtggagataggtaatacatggtgtttgtaagtattttattttccactttctcagaataattgtttcagtgaaagtagctaaaaggtaaaattttattgatacattttgttgttttcctattagcttcaatatacaaatatgggtcccagtgaaaacattgtgagattgaattaaacataattttgagaacgaattagctgttgactggaaaatatggagggatactgtttttagtacaatagaatataattttctgtacagtgactcctgaagaaataaatttttgaaaccctttgtataattttgctgacatagctataaaagacaatttttttttctttgtatttcctcaatttctgggtaattctttgaccacttatgatgattttggaccaatttccttttattcttttaattttgtatttgagggtctgtaacatttgttagaacttggctacaaaaccaggtaagaatctcatctcatgtataatgaactgtagtgtattgacaacttgagttttatggtgttttaccatgtgaataagttagcttgttcttcatcaatttagaatttgctattacataaacttatgtattttttaaatctattatgacttcttaagtggtataacattatctcccattacttcacagttacattgtagtaagcagagccagtcccatttcacataagaagaaatttgtcaaaggaaatttatttgatcaagtccaggaaatgtatagcaggcgaagctgggtttgggatttaaggtctttaactccctatagctctgaggcatagtgcttcgataaactaattattcataaagaatttacagtccctattttacatagaactcttttaggtaacttctatctctaagcaaagatttggtttagtgataatatttgtacacatgagaagttagctatcgacatggtatttaccaaatagagtgaaacatactcggacaaattcataggagataaagagcaataggcattagaaaaacgattatactgcaggctaccacaattagagacagcaccacagaggaattgaatttgacctgcaaatggtaaaatttgtgaatgtggagaaggaacagaagaacatttacatacagtataaatatacttatggagatgaatgcacagaaagtaagttgaagatgttattaatcacactgtctgaaatgaaaggaattgtgggagtcaatcttgaaaagcaagattgaaaaagagttgtacagtcttgctaggctgaagattttgtgctttagtctctatgctcaagaacaaagtatttttggttatattaatccagaaagagtttggagggcacattagaatggaaaaaaatgtaagattcagtttgctaactgtaaggaggagaattgaatgtaatcgtattgagtatgatttcccaactttttctgctaagaggttttgcattgatgatgttatacgaatggtccttcattgccttctgcttaaggaatttatgaacaccatgatacttacagggcatattttggggacctcatagtttaaataattgtttctgtgttcataagcattttcatttacttgtctatacgtgttgctgtgtttaaaacatgggtttcatccttttcccattatcaatattaagtactcaattcttctataggtcattttttatataaataagcagatatatattgcacagattttagctatttctatacctatttcacgggtgattcatcttactactctggtggtgcttaagggaactttcttattgtaattagtttaatccaaattattcattccttcaaaatctaaagtttacacttttacctagtgaaaaagattaatccaggcacctcaatctttatcctcttagatggatatataggaactactctactatggtttcttctgtaataccagtgacttccaggttaagagggtagggatcttggttaacattaaagaaaaaaatatacaaatatcagcagcaaaactcttactatgctcttagcttgggtattgatgggaagtaaaaaaagatcagtgactggaagaaatgaatgatgaaggaccatcagtcattcaataaatattatggaaaacatactatgtgccaatattgttctaagcactgaggatacattagcaaaaagacaatgcttatccttacgtagcttacatcctaatggagagaaaactaataataaattataagtataaagaacaactaaggttaccagataaatgcaattgagaagcataagcagaatgagtgttcttccttcactttctcaaaagaatgcacttcatcgagaaggtaacaattgatcagagacttgaaaagagtcagcgatgactctgttctatgctgaaggaaccaccagtacaaattctctaagaagggagtgaacaggaatgtttgcagactagcaagaaggccagtgtggctaaagcagagtgagtgaaggtgaacacagcaggagatgcagagagctcgcagagaggcaagctgactctgactgcatggattgcattaaagtgcattgtaaatctttatccaagtggagatgtagtgtacaattagatgtagtctgccatttgggagagagttctgggctagtacaaatttaggagtcttcaggctataaacagtatattaaaatgtaagactggaagttatcaccaagaatatatcatacataaagaagataacaggccaggcactgtggtttgtgcctatagtcccatatacttgggaggctgaggctggagtatcacttgagttcaggagttggagtctgcagtgaatgattgtgcccctccactccagcctgggtgacaaggtgagactccatctcttaaaaaacacacacacacaaagagagaagaggaacaggactgagttctcagagattccaacattaagagaccaagaaaaagataaggaagaaaacaaagatcattaaaattaggagccaagttacacaacatgcttcttgttttctaaaagttatgactaaaattgtatatacaaaatgacttcagttataaacttaaaaatccctgttttgatgttcatagtttgcaaaaggtggcatttgtttatgatcttttttcgacaaccctgtgatgtaggtcaggctgatgttattatctccattgtgacaatgcagaaagaggattaaagagatttgcaatacttttttgaggtcacagaatgagtatgttggttttcaggggatttgaaaataatacttttgacaccactgcatatgatctttctactatgtcctgccacacgaccccttaccactcgcagctaaccctggaccagtttgcttagttagaaagagttctgtcatgaagatcgttggcaaggagggttaagaatattaaagaaaatgaaaaaagcaaaacacattctttatttcgtaattttctctgtgacattcctactttaacccattcacaattttatttcattgaggagaaattaatttggaatataaacttccaggtttttacctaagttgatgcaaatatatatacacactgtcaccatgttttaaatagaagtgaaattatgcaatgcctgtgtattggactacaacctgcttttttctactcatcaatatattaggtacactgtcgtgggccagctatagagttggagagtccaatttagaagggggatggtgtctatgtttggaaaatgttcaggtaatggaccttcgccgtctattttcattgggttttaacgctccttggggctcctataccctctttggattatttcacacagaaataagtcactacccacagtgagggagagtgcaggaaaagtgtggatgaacacatgcagttggtggcttgtctttgaattctttggggatccctttcacctttactctagctgccttcttgctgtccagatcttcaaattctatgtttcaggtccgtcttttcccactgaagtacccagttgctaattctgagtgaaagtagaattgtgttacagtaaatctaatcaaagaagaaattctacatcagcattatttaaaaaaaaacttaatcattgtagctatcattttttgtttcaaaatgtcttaacttgaattattaatttctagtactgtgcaagttggataagtttatgtaaattagtacttataagaaatattttttataaaattaggagtatatatacatatataattatatatgtatatactatgtaagtatatacttatgtaagtgtatatacaagtatatacttatatatatcatgtatagcactgtatatatataaatcactatatatacacatataaagtgctatatataatatgtaaatatacatttttgatatgtcatatatacaataatatatacatactatatatgtatgatatatatcaatattttatgtatattgacatatataatgatatatgtataaatcaagcaaaccattggaaattgatgattctgaaagactgcaagtgtaatcttgcaagtgccttcacttatataccatattaggaagaaagaaaagaccagaatatatatggttatggtatttttatatgaaatattctcttacacataataaactcctaacacattaaactatcagcattatccatgaacttgcatttaaacaattatattgcagttctaccttcttcaataactgtaactttattattttcacctctcgactctgattgtttattttatgagatacactttatggtactttcatttatagtaattgggctattcactacatagtgcaacaactggaaaacattttgctagcccaagtctaaatcttcgtaaacatgatcaattttgtaataagcagaagttgttaacatagaaataattaatgtttcctacctaaaacaacatctaggcttcctttaagttaaaaaaaaaagtaaatttaaattcattgaagtatggagaggtaatcctcatgagtgaaaattaattgttttatagacttagtagcagaagagcaatccatatacaatttacattaatgctagcatgtttgattatgcatgcccctctcgtcctcactcatctagaaaaccttaatagcagagtatttttactaaaggtcttaatttcacattaaccataacttcatatagtaaaagccaatgtagaatagcagtgtaaaccagtgcgtctcaaaattggctgcacatagcaaacggaaaaataaggcacccacacccagatccaactacaaagactgtaagttaattggtctggggtggttgcaggcttggtatttttaaaaggtctccagactactccaatgtgcacaaaggttgagaatgactgatgtaaacaaaggacataaatactggtgttttgagttataatttaaaaaataatgaaaatcttgtaactagtcacactatccacaaaaagaataatgctatttaaacaaaaattagtaaatccaaataacactttggaaaatgtggcatgaagtatttttaagcattaataacaatattaaggatgtgggacattcagatacaaaggataagctttatatatttattaaagatactttgctccctcagtgatgacttgggacaaaaggaaacatttctttgggaaaaaaggtacatcacacagcgtggcattttcatttagaatgaagtaaacttttagaaagtattcatttttctttttaaagacattggatgaagtggtgagcacagattttaatcaataatacactactgcaataagtaagtggggtacatcatgaactgaactcagcttgaattggtacagaggtgactgggcatttttaagggagaatttttaagtagagaaggggcaaataggatccaggtgagttactgactcttagtagagtcaggaaaccaaaaaattgcaaagtactggtctttataaatgctgattaggccagtcagtctgttagcttgaaattctagttaggattctatccttccatagactgggaaatagagaccctatccttcctgatgattacattttaatgaaatggctttcaggccctggaaaaagacaatactgaattgtaggacatacatatacatcttaacacacagagaaaggatttacacttataagccctttttagtaaaagctctaagaaatggtggccagggccttatcttcaggtgttggctggaacgaacaataaattcttttggcagccttgagctttctgaagcaggcactttaagtatggctagggtcatcctagaaatatggccttgagctttagaaaagatgttagtatttgcttaagtcttttattgtggggaaaggaggaggacaaaactatttgtgttgagaggctgtagtttgtgtaggccagggttgaggcctagtcaataacatgggcctaaagagcctggctagagtttggtcaaagagaaaattgttatcattatctttgtcactaagatctaattgtactcatcttttagttgtttttgttggacacttatatctctctcactaccatgccccttgatattccatctgcctggaatattctgctctgtcttcttcatctcaatagtcatactaagccctcaggactcaaacaaaatgctccctctgccaggaggccttccctggccacctctgttctctgagtttgacttagttctcttattattttcttctatagaactccatgctaccccaatcattaagcttacagctgtgattttaaagtctgttttgtgttaaccttcattagactgtaaactttatgaaggcagaatttgttccatgtcagcctgagctagtggtttagcttctagcccagtataagttaaatattttttgaatgaacacatgctgaattttatccaacattactctgaattggtatcatatccaatagacggattgagtcctttaaacccactgggtagcagtgtccttccaagtattgactataatgtcctgtgctgctttgttaaaagtgtgacagagatccctatccttatcaacataactgcatctcagcagagtttggctcttgcacttcactcctttagcaatcccagtgtgtggtccatttcctcagtgacctgctgtttgcctttccccttttatcaggttctcaacttgacctttccagaacaccatattgctcttatactaatcttcaacagtagtcatcttagtgaatgcttctcacttcatcttaggattttctggtaataaattctactcatttaatcagggacccaaaagccttcaatggggcaagttgtcttggcacttataagctcatcctgacctctttcatcccctccagtgggtggctccagcgaatataagatggtgtctctactgtaaacttctaagcttcctacataatttgcataactttttttttttttttcctttaagagacagggcctcattctgctgttcaggctagattgcagtggtgcaatcatagctcactgcagcttcgaactccagtaactatttgatgttttctggcatttaatattgaaattaacattagccagaataagaagtgtaattagctgcttgtgataatcatgttagtaagcataatttattctaaaacatattacctcatatttaaagagttttaatcaaataaaatctatgtaggatctcctcaagatagtgaggaccttaaagctaacttaaaaattatacaaattaatttatatggagatataattatttcatactcaataaatatagacttctgtagacccactgcagtgcttaggatatatggagtttacaagtaaagaactaagcgtctgtatctcctgaaatttaagagagaaatagtaatgaaagattgtgttgtactttagatcacactagaataataaagtgtcaagaaagtgaatacaagcaacatttaaagtctcatatgaaaagttataccataacatattttccataacatggcatgtgaataggcttcaaaaaatacttgaatacctttccatggattctgtagctaattctgttgcaggaatgtaagtttgattcccttcttcatagacggttagttcaaagactgaacaacttttactccatatgtttttttcatattttttcaaaagggaatgtgtctattcattttttttgcataaatgcaaaatgccaatataataataatagttgatgcttcctgcttgcttgctgtatgccagacattgagtggcttacatctgtttcctcatttattgtgttacattggtatcaaatactcttacttgatttaattgcattcttttatctggtgtcctctcttgggcctttctctgctctctttttcggtattccattccactatgttttccccacccaccttcagtccaaattattcaactgctaattatgctactcatgtttcatttttaaaaacaagtgctttcttcactttatatgtcattagccaaaaaccaatttcacattggagaaaaatataaaagcagattttgtactgaacttcgactggtttagtcaaaacggtgcaagcaagtggtttgtatgtataaactagctttaagtaaaaaacaacagaagcccaaaaccaaaataaataaataaataaataaaacccatgagctgaagaggaggagttctctgaatgtgaagcggtagattccataacagtataggctcttttatgaagaaatctgtgacagaggatggaagaaacaaaatagttcacaaaaggtgtgggtgaggggttgacaaagaaaatgtgtaacacaaaatgtggacatttgtgaggtatgcctcagtgctttgcgttcataatttgcatattaagaagtcacgcgtctgcacgtaatgaatccccaactagtctctgacacaatagactgatagtccctggaggcgtcattatggcctatcatgtcaatgatccgcatattaatgactctcttatacgctcatcaacaggtagcctaataggcttccattgagttctttttcatttgctttataaatatatcctctcttctcttccttttgtaatactattgtgaagaattgacaaaaaggtgcattaagatgattttaatgtgtgacgtaagttcatcaaagcattaaatttagaaataatgctttaagacttactgaatctgcgtagaaaacttttcaaatgctgttaaatacaaatccagtttaataatagggttcttgtttggattttaatgcaaactaacccaatttactgtatttctgttttccctgatacattaatttatggcatgattagcataagtagaataatttgaaaatatgtttgtaaaatggaattgcttgaaaatagatataaattccaacagatttcatatcatagaggcatctaaccacttataaaaactataaagcagtaactgataatacaaacaaaaacatagagtaaatactagacatatatttgattgcatagcaatccagaaatgtgcccaggatctaaaaaatgacttcatagcttctaaagttaatatttaaataagatattcacttcattgttgtggctacttttaacattctaacttgctttggcatgctttaattttattagtccaaattatttaagatatctggtgttttttttaacaaatgtaaaatctatgatttaccataaaacatattgaagcattgcttttccagtatttttattgagttatgcatcatttcacatgatttactctccagataatgggagggctattgacacacatttgaaattctttgtcaagagccaggaatgagatagaagctgggaaaaaaagttgaagtttggtactttgttctctttaaaaaataaaccacatgaaaacatcccatcttggggaacattagaggccacacatgctcaggtgagtggctgcagtttgatgctgtgagctcacacctgccaccctattgggtaagatattcctctcctgagggctgtcacttctgaatgatttgatttcaaagttcggaagtctcatgtcctcctgtattcattccttctccaaactcttccaaacatatactgagaatattggtttacatttaagatcaccttttcttaacaacagttttcaaaataatatgttaattcaaatactatagagtttggaggttagagctcaatatttaacaaatcaggtgacttaggtgaagtttgctgtagattccgtggaggaaacaggttttgttgaaatggaattagttaactcagtggtcatgactctaataatgattttttatacaatcacaaaaaattagcatctttataaagaaaataatgcctgaaatttagtatccctaggaaaaaaaacacacatgacaatacactgattatttttgaaggctgtaggtagtataaagctgtcagcacttacgttgtgaggaaattgtggagacagaattgtggagataagacttctgaggtggcaagactctcagctggacaatcactactttcttgctacccacctgttccaagggtgactattgtttaagaacgcaggtaaaataaggactttaggccaataactttgagttttttgttaatggtatctctctgaagtatattcagttgttccagtatccatagctgaaaaacatttgtatttttctctcgattgaatatgattggcaggttgtaatggagttctttgggccagctttatctgtaagtcttcttcagcttacaatttatgaatgctgcttgtaattatatctcattccaaagcaacctaaatgttttttggttcgcacttggacctcccagattctacttagttatgcattagatcctgacaattgagtgcctctttggagagtacacagctctacagaattgcacatggtgcccaatccaatcagagaattaagtctaaaatgtcttttctccctatttcctttggggtgagctagaaaaaaacaccaccacctaccactttgtcacaacaaagcaaatttcgacctgttatccttggtaggaactgaagagttaaaaaaatgaagaaacttttgaagagagatttagcaaagaattctccaataagattgtttttcagttgcttttctgtctgctgttgaaatttcctggatcaataaggcaaagtacctcttgttttcagtaagatcaagctccgaggtactgggcaatgttctaacttagatattgaaatagagaagatttttagaaatgcaacaactcagttttatgcaaagatgaagataattcaatgaaacaatctggtcacaaacatattggtatgttctaagttacttgaatgcttgagcagtttagtacagtttccccaatggacttgtggttttccatggtttatagtcacattttaaaattaataaattagcttatataataggtatattcgatgtatttttcttaatcaattatagatactggtaatgttttacttttgaaaaggttttctttgccataaataaaatatcatggaaataaaccattccattacatgtagtagaaataatataagactagctcacaagctatgcaggtgagatttctgtggtattaaatttaaattaataatactgatcttatgatttaattgacaatttatccttggctatattgcaattttaggtaagcagttatttctattgattctaccagcatttttgtttttgaaaaatattaagaattttttcaattaaatacctctaaatgatactcagaatactcctttaagttatacagatgtagagctcttaaactgcaaggcatgttatttaatattaaagctgagaagtgaaattggttccattttgagcaatgaaggggttgatgggtagtggctgcctggctgtgtaaaagaaaggtagtggggctcaatatgaccgcagcaaggaagtccctttatctgttatcagagcttgccatgagtgttagagagaaaggtcagcatgagtgtattgtatttgtggccttctaatctaatccagagctttcactttacacataagaaatgtgatgcccacaaaaaaacaatgtgtcggtcaaaaccaaaacaaaacgatgtgccttactgtgtcagttattagtccccagattcagcatagaagaatataaagacattttttaaattctcactgtttctcttgagattattttttgcttctttcaatgcctgttaatcatgccaaactgtattcatttcgttttcatttctggcattatcatcaagaaactgaacctaatgcatcttttcatccttaattccttctgcatagttccttaaatttgtttttcctcaggcgcttctcttcacaattagacactgatccctcttttaatcaaatgttcctcttccacttttggttttattcctgatcaagagaagactagccagtactgtaacaccaaaggaaaatatattaagctgtagtagttggctaatgtattatgaattttgcctattgttaagtataagtctttactttcttcctttcttcaatatatgagtggctatgaaatggcagaattctagaaagtcaatttttagagaagctgcaacataacattatgaaaagaaacagtccacaatacactatataattatttacccttggaaaacctgttcgacatttctgtatgtgtccacttagtgccaatgacatactactcttgagtgactttttaaaaaatctcaaaggaggctcatatttctgattttaaaggtcatttattttcctttcttttgtggagagaaggagagcaaaagaaatgagatcacaagctttgaacaaagagggctggtctgaacttgagtaatttcacatttactttttagctgtttatcatagagtgagaggtgatgcccaagaattccaagtttggtcctgtttagaaaattctgagcactttcaggctgagtgttaaggagacacaaatacaatattcatgactcactttggcaatgatcccttttcatgccaacattttcattcctcttagagcagagttagactttgctgcttacaacctaatcctgccattcaccttaactggttgggtaattccatcacatcagacttagactttgtggcatagatctttaagaggttttgctcgttttttaagagacatatggggttttagcacaatggcattataggacctttggaaaaaccatattattatactaaaaatgactacattttgacagtgttaaaattaattataattccaaaagcaaaagtgcaacatatccagaaactgcagtaatattaacatggtgtctaaatcctggcactgaataaatcaattgggtaatgaaagaaggtgcaaattatcatgccagtgtacgttgtatttagagaggatacttttaaataaaaggttactgtcactgaagatctaatgatttttctttgaagggtgctcttctgataataagggtatatttacatggctgagcaagtatgctatcatggactgcaaattttactcttagaagtaccttgaatattaaagatatgagagaatatggtaaacattaaaaatatagataactcagagtaaaagaagcagcatacaaattggtttttgtgataatgtagaattaatgatcagtgtgccatttactacatttcctaataacaataataatttattaaacactttcatgtgttggaaactatgctaaataattactctgtgttaggagtaggcaagattttagagaaaaatgaggcgcagagaggttgattaagtatcttgactaaagtcaaatggtgagtaattgagttagtaagtgttaagtaaccggaaatactgagatttgcatgcagggttttttttttttttttttttttttttttttgctttttttccaccacatattgaccctttatggaaagaacactaacataatgactaagaaacttggagctagttatggatttgccactagttggttggtatgacttctgccatattgtttaactgggctttagttttcttttctctataaaatgatgggatgagacaatccaagtatgaggtctcttacaaatctgagaggaatttggcataaaaagtaaaataaatctttctgtaagttgcatggggctcagaggtaaagagtctgtagaactcacatttttgaatgattaatagctgacttagaaacacaaattatttttgcttacttattttattagataggttgaaaatgtccttcaatttctaccccattgatgtttcattattttattctgtaagtcacagatgatgattggtctattctacaatgtgtttcttctttcctgggtgcatatgagatacacaaacatttattcttttgtgcgtagagctatggcataattgtgtgtaacttgctggaaaagtttgagatgtaaagaggcacttcgtgtaccacattcctggagtctgagtgtctgtctgcagatattcttttttaatatatgtagttagacaagcactagtgcacctcagctaactctgaggttccagttaaaaatgcagattcccactgcccactcagagatgctgattcagtagatccaattttagtgcacttcagctaactctgaggttccagttaaaaatgcagattcccactgcccactcagagatgctgatgcagtagatccgatttctggcccctgaatagcatttgtaccaggtcattttcacataggaggtctgtgaaccacattttgagaggcactgtttgggtttgaatttgtgcctcttaagctagttgactaccaattggctggtgccctgggcttttagtctttcatttttactaaattgtatcttggattacttgacatgttgagaataattctttttttttttactgataaagtttttgcatataatgccttaagcttggaattgcttctctccttttctctagctaaggcttcttatttaggtttcagcttacaggccatgtccttctagaaggtattcctaccccactctgttcctcagggagcacacagttatcataccctggcgctgttgctttatgtacttgtccactctccccattagcttgtgagagcagggactccgtcttgcttttttggtaatccagcacaacatttcacaattggtgggtactcactaaatatttgttaaatgatgatgcattgaatgaataaatacagattgctataaatttaaaattgctactacattttacaagtgtaactattgcctggaaaacattcatttcttatgttcagggcatatttatttaatgtctactagaagtcgtcacataaaatttcaatattatgtctcatttctttgaagtgagggaaaatttaccgcaacttataaagatagtgcaagcctttgtgcaatgatattgtaagggaaaaaggaaaaaatgtcaatctgggcattttccattcaacaaacactagttttcacttcccatttggttaaagagtttacaagtttaacatgtttccttcaataaagcttatcctctttctttcacccatgcttttccttttaagtctccatgtcaagtaatggtggttccatccttttagatctccaaattagaaacctctgcataattctttatttcttgatatcttaagagttatgtaaatagtagcaaagcatgctttaaactcatatgaaactagtaagaagcagggcaactgggtttggggccaggaattgcaactaaaggaatgactctcccacctgtctatcatctaaggaggagcagctaaatccagtggggcagtgagatgcattgttgtccatactaggagtttgcaaatctggcctctcatcaaaatcattttaggaaatttttagcaccatcattctctattccccatcttcacctccatatacaggtctatattaatttagattttatagaggtagggcctgaagtttttgacatgaaaggcaattctgggaactattgttatatttgagatctactgtatttatgagagaggggagagacaacgtaacagggcttctaaacagctgagatgtttaaagttcctttgtgaacttgatttctagttccttagaaattcatctggtagaatgccccagggggccttctaaaggttggtaagaactccttagaatgttatggacccaggtgactagtgtgaatgagaaaacattttattttcctcagtgaacgactggaatcagaaacctagaaataacttgctggttcaccatctagacatgtgtgccagaggttagggaggaaccctgaaaaaggtgtccacataaactcctgggaagcaagtcacccagcacataaaacatcaaaaccaatctgcagactaattcaagaccttgctgacttgtagtgcaggatccctcagttaactgtctttgcctaggtcttggaaggggcaacaatgtagatttctaattctgatgaatgcggctgaggttgggtagagaagggcattaaaaaatctatgtacagcatattgatgctacaacaaaaattaaaactcatatttggttctttttctctttcttcattaatagtaccctttgcccttatcattttgtgcctgaaatgtttcaggagcctctgattagtctttctgctccactgtggctcatcccgtccagtttctcctctacattacctccagaaatacgttggtaaatgtaaatctgaccacgtctctctcctgtttagccctaaaccccatgccactggttaaaaagtacctaaataattcaacctcattttgccagctatgctaagccctttacaatctggcttgaactaattctcattctaccccttggcattctttccccaaacagagtccagccctctgaacattttgttgtttctagatgtgactttttcttttgtgcttttttttttttccttgagacagagtcttgctccgccgcccagactgcagtgcaatggcacaatctctgctcactgcaacctcctcctcccaggctcaagctattctgcctcagcctcctgagtagctgggattacaggtgcctgccaccatgcccggctaattttttgtattttcagtagagatggggtttcattatgttggccaggctggtctcaaaactcctgacctcatgatccaccctcctcggcctcccaaagtgctgggattataggcgtgagccaccacacctggccattttgtgcttttttagtcttgtctttggcgacctgttgttccctctgcctacaatggctgtattcttttctaattgggaaacttctagttatccctaaaacctaaatcagaatgttagtaactttgagataaacttcctgatttctccaacagtctcctgataacttctgtcctttcttcttatttctaagagaatatctatcatatcccattgtttattataatacttatcacttatagtaattataattacctattgatatgtctatttccatcttcacattatagcttcattgaaataagaaactagggcatatttattttcagtttctcagtgtttgttataattcatgacacacagatattttaaaatatctattagaaaaaccatgattaaataatatagatgactatattatataatttaaggtacactggaaacaaagtattgttccattaattaatttcttttttactttttaatttctaaaattataatgattttaaaattatgcttaaatcttgactcattattgactccataattgaaaacattgtcctgaactctgaaggggtaatactttaagtcttagaagataaacaaaaatatacatattttaaaatattagattattttctgaaattagatgaagaaataagagaagaacactgtcatagtaatgttggcaaaaggtagagaggagaagggagggtggagacgatgctgtgcatttattcactcaacagcatttcttatgccactattatatgtcaggcactgtgttagccacagaaaaatatgaaactctcctttatcaaaaagtactcgaggaacataaaggtgaaatgagagatattcaaaagtatactttcttcatgtcacaattgtcatagttctgggccctatcatcatcaaccatcaatttgtcttttttctcaaatgttctaaagctcttaaattcaactctttagatctaattggtcatatgactagtactttgaatttcagagtggcctctaatgtgggccagagagtactctatc

SEQ ID NO: 1065 - DNA, 32306 bp, Macaca mulatta
  source 1..32306: mol_type = genomic DNA
ctcagtgtctcaaatgtcagcctctactagtggaacagttctctcttatttgatatcagagagcccaatggagccttctgaagtacctagtcagattagcaaagataattttttagaagttcctaatttatctgactctctttgtgaagatgaagaagttactttcaaacctggtttctcccctcaaccgagtagacgaggttctgattcttctgaagacatatacctggataccccatcttcaggtactagaagagtttcatttgctgattcctttggattcaatctcgtgtctgttaaagaatttgattgctgggaattaccgagtgcttcaaccacttttgacttagggacggacattttccacacagaagaatatgttttagccccactgtttgacctgccttcttcaaaagaagatcttatgcaacaactccaagaacagaaagcaatactggagtcaactgagtctcttcctgggtctacaagtatcaagggtattattcgagttttgaatgtttcttttgagaagttagtatatgtacgaatgtctttagatgactggcagacacattatgacattttagcagaatatgttcctaattcatgtgatggtgaaactgaccagttctcctttaagatttcattggttcctccttatcaaaaagatggcagtaaagttgagttttgtatacgttatgaaacttctgttggtacattttggtcaaataataatggcacaaattatacattcatttgtcaaaagaaagaacaagagccagagcctgtaaaaccatggaaagaagttcctaacagacaaataaaaggctgcttaaaggtaaaatcaaggtgaggatatatcttacatactttattcataatcttaaagtttttatgttattctttatttcatgtgttgtaagaaagtcactctttaaaaatatactgcttgctatgtaaaaagcaatggtgccagggtttaacaaggtcaaagctattcaaatgatagcagtgggttatcctttctacaaatgtgagaaaaaaatatgggaaggggaacatcacagaccagggcctattgtggggaggcgggagcggggcgggatggcattgggagttatacctggtgtaaatgatgagttgaagggtgctgatgagttgatgggtgcagcacaccaacatggcacatgtatacatatgtaacaaacctgcacattgtgcacatgtaccctagaacttaaagtataataaaaagatatggctataacacaataggttgggagagaagtgcactgtgtatattacttgcctaatgagttataaattattcctgttcaaaccttaaaatctagattattcacatacaaaattatttactttgatatttaaagtgcatttattttcagtggtttttaaatgtctatgttttactttgaaacagttttgattaacataaaactatatttcaatttgtaaacttctcccaaaagctgcaaataacttcttaataatggtttgagttacacagggatgtttgaagtgatacatgttaatttacattataaaagaaatgaccttaatgattaacagaaagacataagtacatgagtcatatatgagttacacacacaatttcattaattataaccaaggataacattatggaacacaaattagtataatttagtaaaagtcaatggagcagaacaaagaaatgacccaaatataaatagggatattcaactatatagattagagatttgggatgtgacccctcattagtaaccttgctctcttgttaatgtgaaaaataagaaaaactggcattcagctgtctcgatagtacatagctggctaatttctgtgacactaggtaagtagataaaacgttcatgagaagtgataccccttctttcctcagtatcccagagggaaagtctacattgctccagccacaggcaaatgtttgatcatcctctgagtgctccatcctaaccgtccctaaacccaaggattttggtaactgtactggaaatagtgtaatataggaaacaggaaagggaactgtatttggaatcaagacacccagatttaattctctaaggggaatttaatacaaagcataagatatgatattgggaaattttttaaaaaattatgctttaaaggataaataataactactaaatgcattgttccaatgtattaataaactaaatgcagtataggtggaagcaattcaaacatatacgttatgtttattttcattttcctttaaagtcatttgaaatattgacttaatcaactttgtgaattaggccaactttcttggtctaaattaaactttctttgattttgactgatgctgttaggagagacagtttaataataatctctacataggctaaaataataatttagatgtttatgaaattactctaacacattagctacacaaacaaaataagttcaacattatttggcaaactaatttatatgcataaatatatacctattaaatactttaaaaataagctaatcatcagtgaatatctgttaaacacactgcaacttgctgtatatgttagagaaaacaaaatttagaaaaggtgcagcattattgtctaaaagctcataaaagaggcagtgttgaacatagtggatttttctgcaatttaaagatgcagttttaagattacaagcaatacctactgaactgtggtttggctaggggattcctttgatttctttgacaggccgaacttgactgataccaagacaaagagtcgccagctgataggcctcatcttctcccttgggcgtgatgtttttggaacttttcctagttgaagatacgtagaaatatatgtgtccacacatacatttgtattcagagcagtaatcactggattcacagcggacaccattcaaattttaatattgctttggggaaaaacctgagaagaactaaaccacaaaatggtctgaaggcctgtaaagtttcctaatgagttataaaaatggaaaaaatctctctccctcaaaaccacaaatacattttctgcacttctgtaacttaaaaatgaccaacataattcaaaccacattttgaaaaaagcatttgcctctggaggaggctttttgtgctgagtttcagtccaacatgaatttttacatctgatttatataccactcaaaatggagtgtataaaggaaatcctgacagatccttagaacagcatgtgccataatagaatatttatacagcttttccatgatataatttatatgcaatggggtttcaaatattcctaaaactcacacaagagagcattatcaaatttctaaatgaatattgcagttggattttattgtgaagagtttggttagagaaaaataacacaccttattggtgttattttacaaaatgtgtacttggttaaaataaaaatgaactaatacttatttgatcaaaaaattatagctactaaaatctcctcctctctccaaatagttacagaatctaaatgggtcatttttgagcatttctacatttcctatgtagcttaatttggaggttatttctttcagaaagtaaaaacagaacatatatacatacatgtatgattttttttctttatacctgcaaatagattagtaacagtgtgtaatatcagttatagttaaaatgaaaatcaggctgccctagtgtagagaataacagctaacttcaattcttcttaatacaaaagttaatttgctatcagggtccctgagattgtatcttctcaaagtgtcaataatcccttctaataagtatggaatgaatgaatgtgggaatacatttaggtaggatttctgttaagtcaatcacccacccaggcattatgttttctctgcggagatttttctcatgttagagtttgcaaatctccacattggtgtgggttgtctattttcttttgatgcctgatagtctatacactttggacagaaagaaatttgtagagagagggggaggtagagcttgtaactcataggcatgtgattgagagtgacccaaagatatttaattgcactgacaggcatgcatcatgagatacttgttaagcatcaccacatatcctagcaagctaagcagatttctgatatatctgacggattttattttaaaatcaatgataaagatgacattgatataaatcacattaaatgtacatagacaaatgagctaaaatagcatacaaaacaatataacctcaaagttaagattttaggcttcagagttgaagatacctgagtttgagtccaagctctcctgcatgctagcaacgtgaacttgggcgagttaagcttgtttttctgatatgttaattgagaataaccataactctatctcataggggttgagattttggtgaagtaatacatataaacttttagcacagcgtctggcacataataagttatcagtaaatgttgactgctgtaaaaagacaatggtaacttcatttttggttgtgtctgaaaaactgtaaggctcaagctgcaccaaagtttttttcctctttcctttcagggcttctaaattttcagctttggagagccattcctttgtctcttgtgagattttaatcaacaaggcaaactaactgaactgtaaattttctttagatatgtgtcaacttatatatgaattatcttaaagccaaaagagaacttagtgaatgttaaaatttccacatttaagagaagaaaaaatgaagaaccagaccaaaaggaataaaaaggcattcgtttaggattgaacagacatgcatattaatttcagtaaagtttacacttagtagctatgtggctgtgggcatattacttcacagctcaaagcctatttattcacctgtcaaataagggtcatgatgtctagcatcacattgattaaaataactttatatacttaaaacttttcatatagcatgttagacacacaaaagggtattgtcaaaagcccaacatcataattgtccctattattattaaatcttgttcagctaatttcctgactcttgaacttgcattatttctccatacatcataggtttccttgtttcaggctccaaaacgtattcagcaaatgtttactaaagaactgtatgtcaggttctgagttgttaggcagcagtatctaactgaaaaatgtggctggagacagctgcctgtgaagacaagtagaggccccaagggaaaaggccttgaaaagcagagagaaatgaaggggagagagaaaacagcaaaaccaagttcagattatctgggtatacaatagaagccatagataaaaaatgaaataagaattatttccacttgaggttttctagaatacatgacctagagctgacattgtgtacttactggccttgggggtggtctcccttctcagcatcttggctttttttccccactgcctgctaaatgtatgttcctaatggctgggtacaccggttgacttcatctggttttgtattttattaagtgaaaccaatttattattttaagtaaagaaactgcatgatataggtgtttgatggtatttataacttggccaggtgaatgcaaataaagttctaaatgactttaaggccaaaggagaaaattgattagtccttaatttttgtactgtagaaaaagaaccaggtacgttcaggaataggaaagagagaaatcctttctaaaacataattttaagaatacagagggtttatctttcagggtggtaaaattgtgaaagtgaggccaaggaaagcattgggaaatggggcataagatatggctacgttatgtgtttcagtcagagctgttggattgtgagacttccttaatttacacatacagtataatctggggtcctggaaatagtccaaagaggtgtaaatagccccacgaggcctttgggacctcatgtatgccataaccaactcgttttgagtccacactaattgtggaagctgggtctgtttaagggagggacctctggcaaggccacgtggaaacataaaacacagctgtgcagggcccatcaggagggtgtttggaagcaaccagctggttgacagcaaggcgccaactggcttcgcatttccttggaggtccaccaaggtttcatggcttcctggttttgtggaagtacatatcccatcctagactttccctagggtggttttgaaacttttctgagagaagaggaacaaaagggtatcctccttcagggtgtctctcacgctctggctgaaaggagtcgctatgaatgccatgcctcaaatggatcctctgggatttctgggagcctatcctccccacctgaagcccatctgcagcctgtaaaaataaagcagggcccactatttctgagccaaaaatcctcctggcaaaaaaaaaaaatagaaaataaaaaaggaagaaaaaggaagatggcaccgctatgaagtgggccaacttagtttttcaccttcctccagttctgctaactgtgactctcatccctattccaagtttttaccccaacccctcaacaggaataactcagggttaaagacctcaagggaagatatctgaagtggatctgattgccctgggccctatcaaactcaaaaaatcctccctagtctgacacctcactttgtaaccttgcctaaaatttacatatatgtgtgtttgtgtgtatgtatgtgtgtgttgtatgtttatctatgtatgtacacgtgcacacgcgtgtatgagattttccttcttaaatgcagaccccttgagggtggcaggagctctctcaatcttatacccattgaggtcagttgcacagaggcactttgagtttggattgagaaaatggaaatgcctgattttagagcagagagcactacagagtacatggcagatttaagtatgttgtgatacgggttccgtagtagtatgagactcatggggtctgaagtacatgtgtgtatggagggttgtgaattccaaaaacattgaagcacaatggaaacagcaagggctttaaagtaaggcaaggccttggggttttaattctaactaattactatctacttgtacttggaaaattatattttgtatctattttattcaagtgtaaaatagtgataataatttctacttggcagagttgctatgaggaatacattagctaacacatacaagcatctattccagttgctgacattttgtagatactcaaaacggtagtattaatgacattcctgtgataaattccacagtttccaatcctgtgtagtacttggctagtactgtgctcaagattaacggagaaatgctgttttccctcattatcatccctgctaccaggacccaggctaaaacaaatagtttcaaaattaatcatgttatggttccataagtcttgggggactagccagggagactaatatttatggcgttgcttctatgggaaaatgatttccaaattatagcatcttctgggtcacaaagaaaactttggaacatcacctgttcataaattggagactgaggacatgtttttttcttaagatagctcttctgaagatggttcttttggactaaataactgagtttattgcacacaattcaccttattatcactttatgcctatgaatagaagatgaaattgaagtttatataattctcttcttctaagcaaatacattatacatcatcaaatttcagtcattcctctgttttaaagcattgtatgtaccccacaactatatgaaaaggaatatatctcttttcagagtatatctctcaaatcttttcagatatctattctgctgcttcagtaactttgctaggttaaatagcatggtagtgtctttatctattaaataaaaataacaactggttttcaagccttaatcatgccatcctgctgtttaaagattttatgataaaaagatgaaaacaaataagttgctaaatttaactcttatgctgcattgctcagggacagagaccaattgtacattaaacaattggtctcttaggaaattctaaaattccctcacacaacaagttactctgaaaatggtctgtgttgtacatcagtgctatttgtcacaactataaattgaattttaatattgtaaggtaattggtgtcctatgtgtagtcatggttttgatttttatttacaccttttgaaatttgcagtagtaaaaaggattaaaataccctccccactgatatttgtaaattatactgaatagtgaaaatgcttttcctaattatgtgagaacatttcttagcctattgacaccatcagaataccatccatggtatttagagaattaagccctggtacaaacctaacctattgactctaaatctgtatgaataacctccagctgattttcatttttaaaaattactgtggatgtgttaacacaattacaaatcacatagaattgctaagataaatttcagtttcataaactatatttgaaatacaaaatatattctatcaacctcaccttttgaagattcatatttataaataattttataatatattaaaacaacttaaatcttgtaagtacttaccaattgaaaaatggaagttttgaaaagtcacgtttaggtgcagcagaaaatagattatattgttcacatataatcttaagtaggtgcataagattattgtgtttattgtatttagtatttagtgtaaatatagttataattagtttccaatgttaatacagtacttgatttctgaacagtttttgttgaatccttttgtagaaaagaccatctaattctatcctttgcttttaacagtattcagaaaacacccagattaaatggttatatagtttcttcttaatcatcttgatatggtttggctgtgtcctcagctaaaccgtacctttaattgtaataatccccacgtgtcaagggtggaaccaggtggagataattgaatcatgggggcagctttccccatactgttctcgtggtagtgaataaatctcatgagatctgaaggttttataaatgagaattcagctgcacaagctctcttgcctgccgttatgtaagacatgcctttgcttctcctgtatcttccaccatgattgtgaggccttcccagtcatgaggaactgtaagtccattaaacctctttcctttataagttacctagtctcaggtatctctttattagcagtgtgagaacaaactaatacatatctcttgggaagattatgttcttcactaatgtgttctatcagaaagttccatgtctttaatgtagccacttatattgttctgtctttagtcatttatttactctttcagttgaattaaatgttggaattcctatccttatacattaaaattaagcaaaattatattgtttctctcaaagatttctattttccatgtcaaataacctcaataactttttcccttgagatctgaattagttaactagaaaacaagtttgtagtgttttaatgcatacgccagagaagaaaaactccatcatcaactgaattctcataaggggtgaatgatatcattattaccaggaccatacactgccaacactgatggatcagcaataacccagttggtcaacaatagtctaaggcgttctccaaaccctgccttctttatgtttgaattctcggtgttagagggactattattacaatatttcctctgggaatcagagaaggaaaggaaactttattttacaaaattagaaagttaaaaggacttcagaagatcgcttcgtttattctaccttacctaaaaagatagctatattagaatttttgaaaactgtggacaaataatgagaaatttagaattaaagttacactattttctagatacctaattttaaaataacatttcattccagaatgtaactgtataaataagatgctgaccataactttgtagcctttattaatttcttttttacatttttattttattttagactcaaagaatccatgtgcaggtttgttacatgagtttattgcataaggctggggtttggacttccattactcatcgtaaatgtagtaaccatgaggtggtttctcaaaccttgcttccctctttcccttcacacttctatagtcccttgtgtctattgtttccatctgtatggccatatgtacccattatatatctctcacttataaatgagaacatgcaatatttgagtttccatttctatgttaattcacttaggataatggcctccagttggatccatgttgttgcaaaggacacaatttcattctttttaatggatgcatagtattccatagtgtatatgtactttttctttaatccaccatcagtggacacttaggttcattacatgactttgctattgtgaataatgctacaataacatctaccagtgtgtctggaaaagaaatgttgaataaatttataaaaataaaatgcagtttagacccactgaaatttaaattggtttacattgtatccctttgttttaaaaaggttaatattgagtctacaagcagaaattatttgaatatatgctaaatttcttgactgtgtgtgtatgtataattttaactaaaagctatttgttctagtcagtgaatatatacagaattttggtacagtcattccacctgataatttatttaggaaattaaacatggggagcagtgtaatactgcccagttatggtcaactcacccttgatgcgccactttttttctgtggaaaaaatattcacacaaacacatgcgcatgcacacgtgagcttttcacttaacctgatctttcttatgtgtgtgtataatccatataaaaaagacattctccaaagagttcatatgttagctagtattttatattttctatattggtaacatttcattccaagttaactttggtaaactgagttaagtttttagacattggcaattatatgaacattcaaggcatttgcttgcaaatctcatgaaacccattcagttcaacaggacccctagtgctactgtgtgcccatattatgaaacttgctttcacccctgattactttttttactttctttaatttaccagtatttctagcaacattttcccatgaaatagctacttctagagcacaacttttcctaaataaaaagttgctgtttgtcactattacatctgatgcaatttataggcaaagaaattaacacctagcaaaggacttaccagatatttttgtgtctggaaaaaatagaacctttgccacactgccctctatatcagtttagtcagcatgtttacaatgttggcatttctaggcagtctccaggtacagtctatttttttcaaaccataacattatattttatcattcataatttttttattttaataagttttattcctttgtgagaaatccaaatattattttattgtaaatcacttcagtcaattcgtaggctactttccaaggtcatttattacatttacaccatttttaaaaaacaattatgaaactacatcctgctggccataacataggcggggtgatgggaacaaatattttgattttttggttaaattccagaaatgtattcctttaatcccacgaagtagttatagatgaagaaactgaaagtcagacttttcaggtaacccttgatgaaactaggattacagccacttttgatatcaaaaccaccttacccttctctactaatgctgcctcattaggtaaccatttgtgaacagtacagaatattaaatctcaataaagtagtggaccctcaatatgttgaaatgtaaatatttagaaagctcctccaagtttatgaatacagtgtagtgactgtaatagggctttcctggtttctgatactattgatgagcagtagttataaaacaatacattatggcgtttaacaatcctattaataatacaagattctgatttacaggtaaacatgaatgcaaccaaagatatgtttttagagctttccattatgtagacactacttccacttgtgttcacagtttctattcaagccagttgcttgctttgaaaacatttttttccttgtctcttactcttccatttccaccacaagaaccagtttgattttccctcttacttgaggctttctaatgtctctaattatctagatccttcctttctctaggcctggcatttaacgcctacatcattcatctggtacatgtcaaatgttgcctatttctgcacttaagaactcgtacgtgtgaccttcttcccaagttctttgaggtcaggaatggtgtattagtctaagtattagtccccatgtgactaacaaaaacctttgaaaaactattaatggcaaatcgttttctcattgataactctgaggcctagtaaaatccaaaaagacttctgaatagttaagtaatgaattatgttaattatggttttaatgatgagtgtatttattggtttcatagtttttaaaaatcagatgcgccctgtacatctccactggaatctcttaatcattgtaactatcatttttgtttcaaaaagtcttgattaacttgaatattaatttctagtaccatgcaagttagatacgtttatgtaatttagtacttataagaagaaaattttttttataaaattaagagtatatatacatatataattatatatgtatatactgtataagtatatacttaatatacttatataagtgtacatacaagtatatatatcattatacatacttgcatatatcatgtatagcactgtatatatataaaaaatcactatataaacataaaatgctatatacacacaaatatacatttttgatatatgtcatatataatatagtatatacatactatatatgtaggatatctatcaatattttatgtatattgacatatataatgatatatgtataaatcaagcaaaccattggaaagtgatgattctgaaagatggcaagtgtaatcttgcaagtaccttcacttatataccatgttaggaagaaagaaaagaccagaatatatgtggttatggtatttttatatgaaatattctcttacacataatgaactataaacacattaaactatcagcattatccatgaacttgcatttaaaccattatattgcagttctaccttcttcaataactgtcgctttattattttcacctcaagactctgattgtttattttatgagatacactttatggtacttgcatttatagtaattgggcaactcactacatagtacaacaactggaaaacattttgctagcccaagtctaagtcttcataaacatgatcaattttgtaataagcagaacttgttaacatagaaatgattaatgtttcctacccaaaacaacatctaggcttcctttcagttaaaaaagtaaatttaaattcactgaagtatggagaggtaatcctcatgatgaatgaaaattaattgttttacagacttagtagcagaagtgcaatccatatacaatttatattaatgttagcatgtttgattatgcatgcccctttcttcctcactcctctagaaaaccttaacagaatatttttactaaaggacttaatttcacattaaccataccttcatatagtaaaagccagtgtaagatagaagtgtaaaccgttgcttttcaaaactagctgcacatagcaaagggaaaaaataaggcgcccacacccagatccaactacaaagactgtaagttaattggtctggggtggttgcaggcttggtattttgaaaagatctccagactattccagtgtgcacaaaggttgagaatgactgatgtaaaccaaggacataaatactggtgttttgagttataatttaaaaaataatgaaaatcttataactagtcacactatcccaaaataataatgctatttaaacaaataaaaataagtaaatccaaataaaataacactttagaaaatgtggcatgaagtatttttaagtattaataataacattaaggatgtgggacattcagatacaaaggataagctttatatattatttattaaatatactttgctgcttcagtgatgacttggaagaaaagggaacatgtctttggggaaaaaaggtacatcacacagcgtggcagagttaattttcatttagaatgaagtaaacttttaggaagaattcatttttctttttaaagacattgaatgaagtggtaaggacagattttaatcagtaatacactattgcaataaggaagtgggtccatcatgaactgaactccgcttgagttggtacagaggtgactgggtatttttaagggagaatgaaggagtagagaaggggcaaataggatctgagtgagtttctgactcttaatagagtcggaaaaccgaaaaattgcaaaggactggtctttataaatgctgattaggctagccagtctgttagctggaaattctagttaggattctatccttccacagactgggaaatagagaccctatccttcttgatgattacattttagtgaaatggctttcaggccctggaaaaagacaatactgaattgtaggacatacgtatacatcttaacacagagagaagggatttgcacttgtaagccctttttagtaaaagctctaagaaatggtggtcagggccctatcttcaggtgttggctggaacaaacaataaactcttttggcagccgtgagctttctcaaacaggcactttaaatatgactagggtcatcctagaaatatggccttgagctttagaaaagatgttagtatttgcttaagtcttttattgtggggaaaggaggaggacaaaaccatttgtgttgagaggctgtagtttgtgtaggccaggtttgaggcctagttaagaacatgggcctgaagagcctggctagagtttggttaaagagaaaatttttatcattatctttgtcactaagatctaattgcactcatcttttacctgtttttgttggacacatatctctgtcactgccatgccccattatattccatctgcctggaatattcttctgcgctgtcttcttcatctcaatagtcatactaagccctcaggactcaaacaaaatgctccctctgccaggaggccttccctggccacctctgttttgagtttgacttcattctcttattattttcttctatagaactccatgctaccccagtcaggaagcttacagctgtgattttaaagtgctgttttgggttatccttcattagactgtaagctttatgaagggagaatttgttcaatgtcagcctgagctagtagtttaacttctagcccaatgcaaattaaatacttgttgaatgaacacatgttgaactttatccaatattattctgaattggtatcatattcaataggtggattgagtcctttaaacccactgggtagcagtgtctttccaagtgttgactaatgtcctgtgctgctttgttaaaagcgtgacactttgggaggccgagacgggcagatcacgaggtcaggagatcgagaccatcctggctaacacggtgaaaccccgtctctactaaaaatacattaaaaaaaaaaatgagccaggcacggtggcgggcgcctgtagtcccagctacacgggaggctgaggcaggagaacggtgtgaacccgggaagcggagcttgcagtgagtggatattgcgccactgcactccagcctgggtgacagagcaagactccgtctcaaaaaaaaaaaaaaaaaaagttaaaagtgtgacagagatctccatccttgtcaacataactgcatctccgcagagtttggctcttgcacttcactcctttagcaatcccagtgtgtggtccatttcctcagtcacctgctgtttgcctttccccttttatctggttctgagcttgacctttccagaacgccatatttctcttatactaatcttcaacggtagtcatcctagtgaacccttctcactttatcttcttaggatttcctggtaataagttctactcatttaatcagggacccaaaagccttcagtggggcaaggtatcttggcacttataagctcatcctgacctccttcatcccctccagtgggtggctccagtgaatataagatgatgtctctactgtaagtttctaagtttcctatatcattttcataatttttttttcctttaagagacagggcctcactctgctgcccaggctggattgcagtggtgggatcatagctcactgcagcttggaactccagtaactatttgatgttttctggcatttaatattgaaattaacattagccagaataagaagtataattagctgcttgtaataagcatgttaataagcataatttattctaaaacatattacctcatgtttaaagggttttaatcaaataaaatctatgtaggatctcctcaagacagtgaggaccttaaagctaacttaaaaattatacaaattaatttatatggagatataattattttataatcaataaaaatagacttctgtagacccactgtagtgtttaggatatatggagtttacaagtaaagaactaaggatctgtatctcctgaaatttagaagaaaaatagtaatgaaagattgtattgtattttagatcaggttagaataataaagtgtcaagaaggtgaataaaagcaatataaaaagtctcagatgaaaagttataccataacatattttccgtaacacggcatatgaataggcttcaaaaagtacttgaatacctttccatggattctgtaggtaattctgttgcaggaatgtaagtttgattccctttttcatagactgttagttcaaagactgaacaacttttactccatatgtttttttcttcatattttttcaaaagggaatgtgtctattcactttttttgcataaatacaaaatgccaatataataataatagcagatgcttcctgcttgcttgctgcatgccagacattgagtggtttacatccatttcctcatttactgtgttacattggtatcaaatactcttacttgatttaattgcattcttttttctggtatcctctcttgtgcctttctctgctctttttcggtattccattccactacgttttctccacccaccttcagtccaaattactcaactgctaattatgctactcacgtttcatcgtttcatttttaaaaacaagtgctttcttcactttgatgtgtcattagccaaaaaccaatttcacattggagaaaaatataaaagcagattttatatttttctgaattcgactggtttactcaaaatggtgcaagcaagtggtatgtatgtataaaccagccttaagtaaaaaacattaacaacaacaaaaacaaaataaaacatgagctgaagaggaggagttctctgaatgtgaagtggtagattccatatcagtataggctcttttgtgaagaaatctgtgacagaggatggaagaaacaaaatagttcacaaaaggtgtgggtgaggggttgacaaagaaaatgtgtaacacaaaatgtggacatttgtgaggtatgcctcaatgctttgcattcataatttgcatattaagaagtcacgcatctgcacgttaatgaatccccaactagtctctgacacaatagactgatagtccctggaggagtcattatggcctatcatgtcaatgatccgcatattaatgactcttatatgctcatcaacaggtagtgtaataggcttccattgagttctttttcatttgctttataaatatatcctctcttctcttttttgtaatactattgtgaagaattgacaaaaaggtgcattaagatgactttaatgtgtgacataagttcaccaaagcattaaatttagaaacaatgctttaagacttactgaatctgcctagaaaacttttcaaatgctgtgaaatacaaatccggtgtaataatagggttcttgtttggattttaatgcaaactcatccaatttactgtatttctatttttcctgatacataaatttatggcacgattaacataaatagaataactaatttgaaaatatgtttgtaaaatggaattgcttgaaaataggtatacattccaaaagatttcatatcatagaggcatctaaccacttataaaaactataaagcagtaactgataatataaacaaaaacatagaggaaatactagacatatatttgactgcatagcaatccagaaacatgcccagggtctaaaaaatgacttcatatcttttaaagttaacatttaaataaaagtatcacaacaatgcagtatcttaacattctaacttgctttggcatgctttaattttgttagtcctaattatttaagatttctgattttttttaaacaaatgtaaaaatctatgatttaccataaaacatattgaagcattgcttttccagtatttttattgagttatgcatcatttcacctgatttactctccagataatgggagggctattgacacacatttgaaattctttgtcaagagccaggaatgagatagaagctaggaaaaaagttgaagtttggtacttttttctccttaaaaaataacaaacaaaccacatgaaaacatctcatcttggggaacattagaggtcacacatgctcaggtcacacacacactgcagtttgatgctgtgagctcacacctgccaccctactgggtaagatattcctctcttgagcgctgtcacttctgaatgatttgatttcaaagttcagaagtctcatcccctcctgtattcgttccttctccaaacccttccaaacatatactgagaatattggtttacatttaagatcaccttttcttaacaactgttttcaaaataatatgttaattcaaatgcagtagagtctgaaggttagagctcaatatttaacaaatcaagtgacttaggtgaagtttactgtagattccatggaagaaacaggttttgttgaactggattagttgactcagtggtcatgactctaataatgattttttatacaatcacaaaaaattaacaacattatgaagaaaataacgcctgaaatttagtatccctaggaaaaaaatacacatgacaacacactatttttgaaggctgtaggcgttataaagctgtcagcatatgttgtgaggaaattgtggagataagacttctgaggtggcaagactctcagctagacaatcgctactttcttgctacccacctgttccaagggtgactattgcttcatttaagaacgcaggtaaaataaggactttaggccaataagtttgaaatttttttaaatggtatctctctgaagtatattcagttgttctggtatccatcactgaaaaacatttgatttttctctcaattgaatatgattggcagattgtaatggagttctttgggccaggtttatctgtaagtcttcttttacttatgacatatgaattctgcttgtaattagatctcattccaaagcaacctaaatgctttttggttcgcacttggacctcccagattctacttagttatgcattagatcctgaaaattgagtgcccctttggagagtacacagctacagaattgcacatggtgcccaatccaatcagagaattaagtctaaaatgtcttttttccctacttcctttggggtaagctagaaaaaacaccgccacctacctctttgtcacgacaaagcagatttagaccggttatccttggtaggaactgaagagttaaaaaatgaagaaacttttgaagagagacttagcaaagaattctccaataagattgtttttccgtcgcttttctgtctgctgttgaaatttcctggatcaataaggcaaagtaccttttgttttcagtatgttctcaagatcaagctccgaggtactggacaatgttctaacttagatattgaaatagagaagatttttagaaatgcaacaattcagttttatgcaaagaggaagataattcagtgaaacaatctggtcacaaacatactggtatgttctaagttacttgaatgcttgagcagttcagtacagtttccccaatgggcttgtggttttacatggtttatagtcacattttaaaagtaataaattagcttatgtaataggtatattcaatgtattgtttttcttaatcaattatagatattggcaatgttttacttttgtaaaggttttcttttccataaacaaaatatcatggaaatacaccattccattacatgtagtagaaataatataagattagctcacaaactctgcacgtgagatttctgtggtattaaatttaaactgataatacagatcatatgatttaattgacaatttatccttggctatattgcaattttagattgtcaagaaagtgaatacaagcaatatataaagtctcagatgaaaagttataccataacatattttccataacatggcatatgaataggcttcaaaaagtacttgaatgcctttccatggattctgtaggtaattctgttgcaggaatgtaagtttgattcccttcttcatagactgttagttcaaagattgaacaacttttgttgttcagcatttctccatttcttattggagaattgattctaccagcatttttgtttttgaaaaatattaggaatttttccaattaaacacctctaaatgatactcagaatactcctattagttatacagatgtagagctcttaaactgcaaggcatgttatttaatattaaagctgagaaggcaaattggttccattttgagcaatgaaggggttgatgggtagtggctgccttgccgtgtaaaagaaaagtagtggggctcagtatggccacagcaaggaagttcctttatctgttatcagtgcttgccatgagtgttagaaaggtcagcatgagtgtattctatttgtggtcttctaagctaatccagagctttcactttacagataagaaatgtgatgcccaccaaaaaacaacgtttcggtcaaaaccaaaacaaaacgatgtaccttactgtgtcagttattagtttccagattcagcatagaagaatataaagacatttttaaaattctcactttttttcttgagattattttttgggttttttcaatgcctgttaatcatgccagactgtattcattttgttttcatttctggcattatgaagaaactgaacctaatgcatcttttcatccttaattccttctgcatagttccttaaatttgtttttcctcaggcacttctcttcacagttagacactgatctctcttttaaccaaatgtttctcttctgcttttggttttattcctgatcaagagaagactagccagtactgtaacaccaaaggaaaatatattaagctgtagtagttgggtaatgtattatgaattttgcctattgttaagtataagcctttactttcttcctttcttcaatatatgagtggctatgaaatggcagaattctagaaagtcaatttttagagaagctgcaacataatattatgaaaagaaacagtccacaatacactatataattatttatccttggaaaacctattccatacaaacatttctgtatgtgtccacttagtgccaatgatgatatactgttcttgaatgactttttaaaaatctcaaaggaggctcatattatttctgattttaaaggtcatttattttcctctctttcatgggggtgaaggagtatgaaagaaaaaaaatgagatcacaagctttgaatgaagagggctggtctgaacttgagtagtttcacatttagtttttagttgtttatcataaagagagaggtgatgcccaagaattccaagtttggtcctgtttagaaaattctgagcactttcaggctgagtattagggagacacaaataaaatattcatgattcactttggaaatgataccttttcatgccaacattttgattcctcttggagcagaattaggctttgctgcttgcaacctaatcctgccattcaccttaactggttgggtaattccatcacatcagacttagactttgtggcatagatctttaagaggctttgctcattttttaagagacatatggggttttagcacaacgacatcataggacctttggaaaaactatattattatactaaaaacgactacattttgacagtgttaaaattaattgtaactccaaaagcaaaagtggaacatatccagaagctgcagtaatattaacatggtgcctaaatcctggtactgaataaatcaattgggtaatgaaagaaggtgcaaattatcatgccagtgtacattatatttggagaggatacttttaaacaaaaggttacggtcaccgaagatctaatgagtttttttttgaagagtgctcttctaataataagggtatatttaaatggctgagcaagtatgctatcaaggactgcacattttactcttagaagtaccttgcatattaaatatatgagagaatatggtaagcattaaaagtatagataactcagcgtaaaagaagcagcatataaatttgtttttgtgataattagaattaatgatcagtgtgccatttactacatttcctaataaaaataataatttagtaaacactttcatgtgttggaaactatgctaaataattactctgtgttaggagtaggcaagattttggagaaaaattagacgcagagaggttgattaagtatcttgactgaagtcacatggtgagtaattgacttagtaagtgttaagtaaccggaaagactgagatttgcatgcaggtttttttttgtttttttttttttcaccacagattgaccctttatggaaagaacactaacataatgactaagaaacttagagctagttatggatttgccactagttggttagtatgacttctgccatattgtttaactggcctttagttttcttttccctataaaatgatgggatgagacaatccaagtgtgaggtctcttacaaatctgagaggaatttggcgtaaaaaataaaataaactttctgtaagttgcatggggctcagaggtaaaaagtctgtagaactcacatttttgaatgattaatagctgacttagaaacacaattttttttttttcttattagataggttgaaaatgtccatcaatttctaccccaatgatgtttcattattttattctgtaagtcacagaagatgattggtctattcttcaatgtgtttcttcttttctgggtacatatgagatacacaaacatttattcttttgtgcacagagctatagctgtagcataattgtgggtaacttgctggaaaagtttgagacataaagaggcactttgtataccacattcctggagtctgagtgtttgcctgcagatattctttttcaatatgtgtagttagacaagcactagtgcacctcagctaactctgaggttccagttaaaatgcagattcccactgcccactcagagatgctgattcagtagatccgatttctggccccgaagcagcatttgtagtaagtaccaggtcattttcacataggaggtctgtgaaccacattttgagaggcactgtttgggttcaaatttgtgtctcttaagctagttgactaccaattggttggtgccctgggcctttagtctttcatttttactaaattgtgtcttggattacttaacaagttgagaataatttttttttttacttataaggtttttgaatataatgccttaagcttggaattgcttctcttcttttctctagctaaggcttcttatttaggtttcagcttatgggccatgtccttctagaaggtattcctaccccactctgttcgtcacggagctcacagttgtcgtaccctggagctgctgctttatgtacttgtccactctccccattggcttgtgagccttctgagggcagggacgtcttgctttttgtgacaatccagtgcaacatttcgtaattggtgggcacccactaaatatctgttaaatgatgatggattgaatgaataaatacagattgctatacatttaaaattgctactacatgttacaagtgtaactattgcctggaaaacattaatttgttatgttcagcacatatttaatgtctattagaagtcatcacataaaatttcaatatgatgtctcacttctttgaagtgagggaaaatttaccttaacttataaagacagtgcaagcctgtgtgcaatgatactgtaagggaaaaaggaaaaatgtcaatctgggcatttttcattcaacaaacactagtttttacttcccagttggttgaagagttttacaagtttagcacatatccttcaataaaacttatcctctttctttcacccattcttttccttttaaatctccacatcaaatgatggtggttccatccttttagatctccaaattagaaccttctgcacaatcctttatttcttgattatcttaagagttatgtaaatagtagcaaaccatgctttaaactcatatgaaactagtaagaagcaggtgaactggatttggggccaggaattgcaactacaggaatgactctcccacctgcctatcatctaggaaggaacagtctgcatagctaaatccagtggggcagggagatatattgttgtctacacgaggagtttgcaaatctggcctcacatcaaaatcattttaggaaatttttagcaccatcattctctgtgccccaactttacctccatatgcaggtctatattaatttagattttacagaggtagggcctgaagtttctgacatgaaaggcaaatctaggaactgttgatgtatttgagatctttcgtatttatgagagaggggagagacaaggtaacagggcttctaaacaactgagattaaaatttaattggagcatttagtccatttacatttaaggttaagattgttatgtgtgaacttgatcctgccattatgatattaactggttattttgctcgttagttgatgcagtttcttcctagcctcgatggtctttacattttggcatgtttttgcaatggctggtaccggttgttcctttccatgttgagtgcttccttcagggtctcttgtaaggcaggcctagtggtgacaaaatctctaagcatttgcttatctgtaaaggattttatttctccttcacttatgaaacttagtttggctggatatgaaattctgggtttaaaattcttttctttaagaatgttgaatattggcccccactctcttctggcttggagagtttctgccgagagatctgctgttagtctgatgggcttccctttgtgggtaacccgacctttctctctggctgcccttaagattttttccttcatttcaactttggtgaatctggcaattatgtgtcttggagttgctcttctcgaggagtatctttgtggcgttctctgtatttcctggatttgaatgttggcctgccctactaggttggggaagttctcctggatgatatcctgaagagtgttttccaacttggttccatcttccccctcactttcaggcaccccaatcagacgtagatttggtctttttacataatcccatacttcttgcaggctttgttcatttctttttcttctttgttcttttggtttctcttctcgcttcatttcattcatttgatcctcaatcgcagatactctttcttccagttgatcgagtgagtcggttactgaagcttgtgcatttgtcacgtatttctcgtgtcatggttttcatctctttcatttcatttaggaccttctctgcattaattactctagccatcaattcttccacttttttttcaagatttttagtttctttgcgctgggtatgtaattcctcctttagctctgagaaatttgatggactgaagccttcttctctcatctcgtcaaagtcattctccgtccagctttgatccgttgctggtgatgagctgcgctcctttgccgggggagatgcgctcttattttttgaatttccagcttttctgccctgctttttccccatctttgtggttttatctgcctctggtctttgatgatggtgatgtactgatggggttttggtgtaggtgtccttcctgtttgatagttttccttctaacagtcaggaccctcagctgtaggtctgttggagattgcttgaggtccactccagaccctgtttgcctgggtatcagcagcagaggctgcagaagatagaatatttctgaacagcgagtgtacctgtctgattcttgctttggaagcttcctctcaggggtgtactccaccctgtgaggtgtggggtgtcagactgcccctagtgggggatgtctcccagttaggctactcaggggtcagggacccacttgagcagggagtctgtcccttctcagatctcaacctccgtgttgggagatccactgctctcttcaaagctgtcagacagagtcgtttgcgtctgcagaggtgtctgctgcgtttgtttagtttactgtgccctgtccccagaggtggagtctacagagacaggcaggtttccttgagctgctgtgagctccacccagtttgagcttcccagcagctttgtttacctacttaagcctcagcaatggcgggcgcccctcccccagccttgctgctgccttgccggtagatcacagactgtggtgctagcaatgagggaggctccgtgggtgtgggaccctcccggccaggtgtgggatatgatctcctggtgtgcctgtttgcttaaagcgcagtattggggtgggagttacccgattttccaggtgttgtgtgtctcagttcccctggctaggaaaagggattcccttcccccttgcgcttcccaggtgaggcaatgcctcgccctgcttcagctctcgctggtcgggctgcagcagctgaccagcactgatcctccggcactccccagtgagatgaacccagtacctcagttgaaaatgcagaaatcacgggtcttctgtgtcgctcgcgctgggagttggagactggagctgttcctattcggccatcttgctcccaagcccgagattaaaatttaaagttcctctgtgaacttgatttctagttccttagaaattcctccagtagaatgcccaagggggcattctaaaggttggtaagaactccttagaatgttagtcacccaggtgactagtgtgaatgagaaaacattttattttcctcagtgaacgactggaataaaaatcaaaaacctagaaataacttgctggtttaccatctagacatgtgtaccagagattagggaggaaccctgaaaaaggtgtccacatgaactcctgggaagcaagtcacccagcacataaaacatcaaaaccaatctgcagactaattcaagaccttgctgacctgtagtgcaggatccctcagttaaccgtcttggcctaggtcttagaaggggcaacaatgtagatttctaattctgatgaatgcgaccaaggttgggtagaaaagggctttaaaaaacatctatgtacagcatattgatcaaatcatattaatgctacatcaaaaattaaaactcacatttggttctttttctctttcttcattaatagtacccttcgcccttattttgtgcctgaaaatgtttcaggagcctctgattagtctttctgctccattgtggctcatcccatccagtttctcctgtacattacctccagaaataggttggtaaatgtaaatgtgaccacgtctctctcctgtttagccctaaccccccatgccactggttaaaaagtacctaagtaattcaacctcattttgcctgctatgctaagccctttacaatctggcttgaactaactctcattctaccccttggcattctttccccaaacagagtccagccctttgaatatctcattgtttctagatgtgactttttcttttgtgctttttttttttttttttttttttttgagatggagtctcgctctgtctcccaggctggagtgtggagtgcagtggcgtgatctcagctcacaacaagctccaagctccacctcctggcattctcctgcctcagcctcccaagtagttgggattacaggtacccaccaccacgcctgggctaattttttgtgtctttagtagagatgaggtttcattatgttgaccaggctggtctcaaactcctgaccctcataatccgccctcctcgtcctcccaaagtgctgtgattacaggtgtgagccaccacacctggcccttttgtgcttttttagtcttgtctttggccacctgttgttccctctgcctacaatgactgtattcttctctaattgggaaacttctagtcatccctaaaacctaaatcagaatgttagtaactttgagataaacttcctgattcctctaacagtctcctgataacttctgtcctttctccttatttctaagagaatatcatataccattgtttattatagtacttatcacttatagtaattataattacctgttgatatgtctatttccatcttcacattatagattccttgagataagaaactagggcatatttattttcaatttctcagtgtttgttataattcatgacacgtggattattttaaaatatctattagaaaaatagagaccatgattaaataatatagatgactatattatataatttaaggtagagtggaaacaaagtattgttccattaattaattttttactttttaatttctaaaattataataattttaaaattatgtttaaatcttgactcattattgactccataattgaaaacattgtcctgaactctgaggggtaatactttaagtcttagaagataaaaatgtacatattttaaaatattagattattttctgaaattagacgaggaaataagagaagcacactgtcacagtaatgttggcaaaaggtaaagaggagaagcgaggatggaaaggatgctgtgcagttattgactcaacagcatttattatgtcactattatgtttcaggcactgttagccactgtgaatacagaaaaatacgaaactctcctttaccaaaaagaactcaaggaacataaaggggaaatgagagatattcaaaagtatactttcttcatgtcacaattttcatggttctgggccctatcatcatcaaccatcaagttctttgtcttttttctcaaatgttctaaagctcttgaattcaactctttagatgtaattagtcatatgactagcactttgaatttcagagtggcattttattaatagacatcctctaatgtgggccagagagtaatccatctatcctcataaattatttgaaactagaattgaactatttagatatttcaaattattaataagcacctgcaaaacaaccacccaaaacagtgactgaattctcatttcctgattccttccccctaatttgacccacctgtattagtctgttttcatactataatttacaaaagaaagaggtttaatggattcacagttccacacgactggtgagacctcacaatcatggcagaaggcaaggaggagcaagtcacatcttacataggtggcagtgggcaaagagagagcttgtgcagggaaattcctgtttttaaaaacatcagatctcatgagactcatttactatcatgagaatggtgcagaaaagacccaccgccttaattcagtcacctctctctgggttcttcccaagacacatgggaattgtgggagttacaattcaagatgagatttgggtggggacacagtcaaaccatatcaccacctgatatagccataatatcataaaaatcaagttatttttagtgtaattgtttattataaaattacttatcacttgctatataaatataatttataatatataacaaaccatagagacatacaacagtatggataaatcttatcaatataatattaaatgaacagttccaaagtattataacagaggacattcttattaagctaaaactacacatatgtaaataaaattacttgtcccttgccatatatattataaagttatatttaactatatataactctgtaatttatataaatatattaaatattatatataggcatatatagctataactgtataatttatattataactgtatacagcaagggacaagtaattttatttacatatataggtagcttttagcttaataaaaagaatgtcctggccaggcgcggtggctcaagtctgtaatcccagcactttgggaggccgagacgggtggatcacgaggtcaggagatcaagaccatcctggataacacggtgaaaccccgtctctactaaaaaatgcaaaaaactagccaggcaaggtggcgggcgcctgtagtcccagctactcgggaggctgaggccggagaatggcgtgaacccgggaggcggagcttgcaatgagctgagatccggccactgcactccagcctaggccgcgacagagcgagactccgtctccaaaaaaaaaaaaaaaaaaaaagttctctgctgtactttggaatggaatcgttcatttaaaattatattgctaagatttatccatattgttggtctctgtggtgtgttaattttgagtgctgtatcatactcctttttgtgatattaatagttttgtatctattctgttgatttgggttggttcaagacttatacagctaacaatgacaccatgagcattcctttagatatctcaggtaatatatgcaagagtttctcttgggtatacacctgggagtggaagtagtggtcatcatttatataaatgttgaattttgaagataatgtcagtcaaattgtttttcaaagtggttgtacctatttattctcccataagcaatgtataagaaagcctggggggtcaggtgtggtggctcatgcctgtaatcctagcactttgggaggctgaggcaggtggattgcctgagcttagtagttcaaggctagcctgggcaacatggtgaaatctcatctctactaaaatacaaattaggatgtggtgtcacgtgcctgtgcctgtaatcccagctacttgggaggctgaggcacaagaacctgggaggtgaagttgtagtgagctaagattgcgtcactggactctagtctggatgacggaggaaaatgttgtctcaaaaaaaaattttaaaaagcctacagcttcagtcatcttcaactcttggtattaatatatttttaatttttaatgaattaaatgagcataaaattataactctttgcagtcttgatttcatttattctctaacaatgctgaccatcccattatgtacttattgaccatgtgtttcctcttctctgatatgtctgcacccttgcccccctacacacagtgaattgtttgtgctttcttgttgatttgtaggagttcattatgtattcttgatgcttatttttgttgattttgtgtaatgaaagcatcttctccaactttgtaacttaatttttactgcatagtctcttaataaacattttaaattttactacagttaaactgaccaattttttaaatcttttttttttcttctttcttaagaaaatatttcctactgttaggtccagaagatattcacatatattttcaactaagaatttcaaggtttttgacatttaagatctaaatccaactggtagccattttctctgtctcaacttactgaaaagtaccatatttcctattgtctgacatagtatgtttgtcatttaccaaggttctggatataccatttatcatataccaaggttctaagctctcaatgttgtcttattagtttgtcttactctaccaatataacactaccttaataaataaatcttcattaaaaatacttaatctgataaaattcctcctccctgctatttctcagaaacattttagctatcacttgccctttatttttctttttagaataatattttcaaattctataaaaaatgttttgatgttttgattagtataaaatttgtagatcaatttgtgagagaattgacatcttcataatattttctatctatgaacatggtatgttgatcaaatttttgaggatct

SEQ ID NO: 1066 - DNA, 32306 bp, Rattus norvegicus
  source 1..32306: mol_type = genomic DNA
gcctcagtatctcagctatcggcctctaccagctgttttctctcatttgataaatcagcgagaccaatggagcccgccgaagtacccggtcagattagcaaagataactttttagaagttcctaatctgtccgattctgtgtgtgaagatgaagaagttaaagcgaccttcaagcctggcttctcccctcagccaagcagacgggggtcagaatcttctgaagacttatatctggacaccccaacctcagcttcccggagagtttcctttgctgacagccttggattcagtcttgtgtctgttaaagaatttgattgttgggacttaccaagtgtttcaactgattttgacttaactagggatgtcctccacacagatgaatatattttatctccactgtttgacttgccttcttccaaagaagagcttatggaacaacttcaagtccagaaggcagtgctggagtcggctgaacaccttcctgggtcgacaagtgtgaagggcatcattcgagttctgaacatttcttttgagaagttagtgtatgtgcgcatgtctttggacgactggcagacacattatgacattttagcagaatatgttcctaattcgtgcgatggtgaaactgaccagttctcctttaagatttcattggttccaccttatcaaatggacggcggtaaagtggagttttgcatacgctatgaaacttctgttggtacattttggtcaaataataatgggacaaattatatattggtttgtcaaaagaaaacaaaggagccagagcctgtagtaaagccactggaagaaggtcctagtagacaaataaaaggctgcttaaaggtaaaatcaaggtgagctcatgctttacatactgtaatgtttgtaaaacgtagttattttatatgatacaagaattaacaatgaaacagaaaaaatgtgtttcttgttcataaaaataagtgtgcccgatttagcaggttaatactgcataaacaatagcattgtcatattcttaattaagagaaattcatgtataatacagtagtaggtgttgtgtatactgtttgctttcaaaccctgaattagaggctcatttatgaaattattttatttagaatacattaatgtttcttaaatgcccatacttcaccctgaaagatacttaatctatataaaattgtatttcaatatgtacctgcagctcagaaatttgtagattttcaatagctgcaatgtagattgtaattgtgtagtgggttatataaagacatttggagtaatgaataccaggttaaatcataagagaaatttattcaataatgaactaacaagaagacaattgtgagtgaagtaaacattgcacttaaaacttcataatcatatcgagtgtacattatggaacacaaattagcataatttagtaaaagtaagtggagcagaataataaaaaaaatgacccagatagaaagaaggctattcagctatggcgatgagagttttgggacatgacccctcattagtaacccagctcgtctgttaatgttgaaatatagaagtagccttcagctcactctgtagtacagagctggctaatttccatgacagtaggtcagcagataaaacacgcaggaacagttagatccctgtttgctcctccccacctcacaaaggaacagccccccttgctcttctagccgcaggcaagcattattctctgagtgatcgtcctaaggatccccaaacaaataatttaatcacttcaccagaaacactttaatacgatgaagaggaaactataaagaatgaaaacgcgcagattccaagtacaaaagagaaactttcagaaattactttgagaagatattaataaatttatgttttaatggataaagaattaaacagtaattaacagacatgttgatctagtggattcatgaattaggctaacataggttaatgcaatttaaatatataaaataatacacttttaattttatgttcatgtcctttgaaaggagcttagtctactttatttgttattccatctttcttacttcaaatgaaacttccttaacttataatttatattattaaaagagaaaacatgtttataacctctatatatgctaaaataaaacttagatgtctgtgataatactcagtaacattatctacaaataaaaaaaataataattcaaagaaattcaaactaacctccgaacaaaaaaaatctaggtattttcaaaactttattgaacgcttttacaccatgcagccaggtgcttgctggacatgttagggcaagcagaatttaagaaaggtaagaatatttggctaaacaagcagtttatttttttaatctcagtacatgtttctacgagttaaaaatccagcttcaaaatgtcaaacagtacattctgaaccgagttcagaaatttttttgtgggatagaatacatctcacttgctaccagagtaaacagggggcagctgataggcccggctgaattataattatggactctagccacggtgtctttggaatatatatatatatatatatatatatatatatatatatatatatatatattcacatatacctttgtattcagaacagtaatcatcagttcagagcagacaccactcagcttttaatattgctttggaagaaaaaaaaagctgagaaaaaccgaactacaaaatggtctgaaggcctgtaaagtttcctaatgagttatgaaaatggaaaaacctctttccttcaaaaccacaaatacattttctgtacaactataacttaaaaatgaccaacataattcaaaccacattttgaagaaagcatttgcctctggaggagactttctgtgctgagtttcagtccaacatgaatttttacatctgatttatataccactcagggtggagtgtataaggaaatcctgacagatcctcggaacagcatgtgccataatagaatatttatacagcttttccatgatataatttatatgcaatgggctttcaaatattcctaaaactcacacaagagagcattatcaaatttctaaatgagtagtgcagttggatttcattgggaaagatttggttgggaataaagaaggatccctcattaggattattttacaaaatgcaaccaaggttaaaataaactaatcgtcatttgataaaaggtaatagcttcaaaatatccttcccataaacaaaagagttgtaaggtctattacaacaattctacactccctacactgtttgatttggcgacatttctttcatgagataacataaacaaaaatatgcatgaatttgtgtttcttaccttcaggtagattaagaataaagagtgtgcaaaacaagtcagagttaaaatgaaaattaggatgacctagtgagcagagtaacaaataacttcaatcactcttaatatgaatgctaatttgctctcggtgtctgtgagactgtgtcaataatcccttctgataagtatagggcaaactgcatgcacacgtatggtgaggcaagattcctcttatgccaatctcccacacaggctagatatttccaatatagacatttttctcaggttagagattctaaatgtcatttttggtatagtgtctctgttttcactcgaggcttattattccatgtgatctgaagtatctagagagaaagaaaatcagagctagttactaataggcatgggactgcaagtgactcagagtatctaatatcagcgaaaggcatgcctcgtgatgtatttgttcagtgtccccacacatgcggcaatcaggtatgtgttatttaacaaactgagcaatgtacagatacatgtaagttaaaaatggaatgcagatgcagtatgcttggaaagttaaatgcatttgagtttgcgttccagctctcctatagagtatacatgtggactggggcaaattagattggcttccctctcggttaattgtgagtagcatagagtattgggaatattcatgacatttccattatatgcatgtgtgtgtgtgtgtgtgtgcgtgtctgtgtacgtgtgtgtattggcatagtttccagttcttaggaatttactaggaaattattagaagttacagtgagctgctttaaacaatccaaaactaacttcagcttgaggaatctgtaaaacctgtactaaggccccacattgcaaccttttaatttcagggctcatggacattcaggtggaaaacgttcctctgtgtctcgcaaggttttattcaatgagaaaacttaacgtttcaattttcctgagatatgtttgaccttacaatttgcgtgtctttgggaagagaacttagtaactgctacaatttctgtatttaatagacgaaaactaaatttctatttttttttttagaaacattttgggtgagggttgctgtgtgtcacagtacgcatgaaaaaagttaaaggacaacttacactagccagttctccccttactccatctgggttcctgggattgaattgaagagatcaggtttggcagaaagattttaaagaccaattagctacctctccggctgcaaaagaccattcttgaagaagtaaaagagacattattttgggcattgaatgaattcactttttaatttgagtaaaaataaataaaagtaaagggtacatatgttatatatctgtgtgataggcatcttgctagttttcttaagagatcagcttacttacctgcctcatggggatattatgaaggccagtatgaaaattaaacaatcttgcatctttaaagattcaaaataacacatacaagttaggcatctgaagctctcataattgtcaccatcattaacaatcttcagcagataactaatatcctgacccttagtctttcagtttttctctcctgacatcaaacatttggtgtccagatcccccagcaaatcaactgtgtaaattcagggcgagtgtgtcaggctctatgttattaagcagcagtaacaaactggtaaaggagacaaaaatatggggcctatgaatatctgcagaaactctggagaagcagagcagagtggacagagaggagtgtgggagaagaggacaaagaaccaaaaaatccaatcccataagctgtgggtatgtggaagccacagattaaataaataatatatatttgtgagatggattttagattgcaaagttagaaaagtggcttcactagaatttttttttttccacaccacctgtctgatgtgtgttctccgctatatacaagatgacctcacctgttttttctttattttattaagtgaaatcaatgtattattctaactaaagaaatagtttgtataggtgttgaatggtatttatgacttggccaggtgaatgcaaataaaaccctcaagtggccttaatgccaagaaaagaatggctggtcttcacttttcttcatacttaaggtatggaactaggcacatgaaggaaaaggagagagaaatcttttctaaagtgtggttttaagaatagagaacatttatctttcaaaacaataaaatcatgaaaacgaggccaagaaaagcactagaaaaaagggtatgagctcaaaccacggtgtatgttccagtcacagccactggactgtgagacttccttaatttacacatcccacatagtctgcgatcctggaactagtccaaagccgtgtaaatagctccacgaggcctctgggacctaatgtgttccatacagagctcattttgaatacatactaattgtggaagctgggcctgtttaaggggagggacctctggcaagaccacatggaaacataaaacacagctgcacaggtccctcaagagggtgccgagagctgccagctgcttgacagtgagaggccaacctgctgaccgtccttggagacccaccaaagttccatggcttcctaatgttgtggaaatctgtacccttataagcctagactgctattgcatgggggtgaagctttctgtcagaagaaaggagtaggggttgttctgtggtatcatcctatctctagtagaaggaatcatagttgaagccatatttctagtacctgtgctgagtccccctgagtccatctccttcactgaagcctatctacagcctgtcaggttagagagaacagcagaactacgtaccggatcccttactatccaccaaaatatggtggtccagagccaactccagatggatatgactccagtgtcctgttggacttaaaagatacactgcattctgatactttgctcttctgatgttgcctcaaatgtgtatgcatgtgtgtgtgtgtgcgcacatacacatacttgtcttctccctcaagtacaaactcatgtttcataagggttgtcatgtacttactgagatcagatagatacacagttccctttgagtttcaataagataacgcaaatgaattttaaagtccaaactgttgtggggagcaaggcatatttacatggataattgtggcaaaggttggttcctggaatagtcttctggattctaaaaccagtaaagtacaatgcaaagtaaagtctgtctttgtctctagttactatttgaacttggagaagctgtatcatacctctgttttattgacgtaaaattggagtaataattactgcttggcaaagctgcaatagcaaacaaattaactcacacacgtatgcaccaactccaagctgctgacacttggagatattccaaactgtagtctcaaccgcagtggtgataaattccagagttgaccatgttgaatgtggccagctctgtgcctagggtaagtggggaaatgctttgtctctcattatcattccttctgccaccacgcaaggtaatatagtttctaaaattcgtcacctccaataagctcttgacactaaccagcaaactgcaaaattgtgcttttgtagaaaagtgactttcaaatctcagacaccgttgtgtgtgtgtgtgtgtgtgtgtgtgtgtgtgtgtgtgtgtgtataagcatttttggaaattggaatcaaagtaatttttaaaatgagttatagcatggttttgaaatcatggtgcattttaaaagatgctctttggaacaaaactctaggtatgaagacttcaccatgtcatctacttatattcatgatcagagaataaaatttgtataatctgttatgaatcttggcatgtttgtcacctgtgtgttttaaggaatgctctttgtcccaccaacaaagtacacacattttctcagagttcaaatttgtcctggttcttaattaatatgtacttatctgtgatttcttttattggatattttctttattgacatttcaaatgttattccctttcctggtttctcctctggaaacccactatcccatcccccttcctcctgcttctatgaggatgttcccctatctactcacctacttcctcctgcctccccgtcctgacattcccatacatggggcatcaagccttcacaggaccaagggcctctcctcacattgatgtctgacaaagccaccctctgctacatatgtagctggagccatgggtccctctttggttggtggtttagtccctgggacctctgggcagtctagttggttgatattgttgttcttcctttgatatttttggagggttaattatacacctttgtgtctaaaaacaaaatgaaaaatatccaaataaattaatgatttggactgctattctatactttttgtagagatctgttgtgaattggttctaatgctttgtcttggtttgcccctctcccactccccaccccccaaatcaggaattttcaagtctagacactgagggtcccactctccaattgttttttgattgattaataaggagccaatggccaatggttgggcagtgagagaggcgggacttctaggttctcaggagaagaaacacaggctggacaaagaaaggatctcaccagaggaaatggaaataagatggacccccacccccacccctgtaaggaacaggaaggtgtaaacgcagaaaatataaatacaagaaggataatgaccctcaaaagggctgcccagaagtgcattgagaagcaaagataagatggctgcccagaaggagccagggcaacaagataaattataatttaagaggtgttaagtcatgaatgctggagggaagaatgtgctggttgctgggaggtttataagtgttcagccattgagctagtcaagacttagcaaaattaggtgtggtatgtgtgtcttgcatttgtgaacccagagatctcttgggctggtacagtgctctctatttaaataattcagtgccacagagatcaaatgtgtattcaataagtcttttcagtttgtttgatagcctctccttaatgtccctctgcattttaaatgctgactatgagacatattcagattgcaactacacaaagaattctaatattgtataaaaagattgtactgtgtttgagttctgagcttgacttgattttgaaattgatagcagtaattaagtttaaaatagaacactctcaacttgacacttctaaatcttgttgagtaataaaagacacaaacacttgcttgtccttggacagcaccagagtcccaatactagtgatggaattctgacttattttacgtaattcagtcaggatgaaagcatactaactaactatagtataagagagaaacagcaacctcccattcttaaagattttagtaaatgtctttgactaattacaaatcataacattgcttaggtaatgaaatgaaacttataaagcatgttactgacatctgtttttgaagattaacatttatagttttataaactgctaacaccagttaagtatttaaagtaaccaataggaaaatcatattcagacacaatagaaatggtgttattttctttagcatgaccatattatgattttttatataaagttatgatcttcttttctaatattaatacaaaacttgattaatcactctttttctcttcttcccttggttttgtcaatactgaagtttcaaactgagggtcttctgcctgtgcctgattgactcatgctctactgacaaacagtgtctttggtttgtaggacatgatttctgaatgattttcactgagtcaaattgtaggagaatttgtctaattctatgctttccggcagaacaatgctgaaaattgccatgactttgtagtttcttcctaattattttctgggaatattacattattcagtagcatgtttggtaagagagctctttaattatatgtctattcataatactttgctttaaataattcagatttttttctggctttcagttgaatcaaacattggaatctctatgctttttctttccacgtggaaaggtttaatgagagtagagtagaggaagagaggaaaggaggctggacatgggcacatggggaggggaatgggtagacaagagacagggaagggggcaagagaagcgaagaacaaagagagcaagagaggtggaatctctatgaatacactttaaatttaagcagatatagtttttaccattgatttctgatttctgtattaatgtcttcaataattttagatattttccttggggtatgagctattaaacttgtaacctggcttagtttagtgtcaaagaaaaaaagaaccctttaacccatcaactggttaatgtctgaatgacaccattacaaggaaattgctttcccagatcgaaggtttcgtggcattacatgggtgagtggtggccggtaaaggaggtttcccaagcctgcagtctgtcattaagttatcaatgagtagcattgctatgatggcatgtctgcgcagcacagagaaggcttctgttcatgacattagaagataaaggaacctcagacgatcacttagttcacagtctacaccaaaacagctgtacgagaataacttaagcctcttagaaaataaatggggaagaggttagaatgataattatgctggcttatacataaccccatttttaaaataaaatttcatttgatgtaattatacaagtaagatgtcgaagactatttcaaataaattgtgaaactccaaagctttgtagaggagcttccatatatggcttccatataccattgcatgaagtcaatactctatttacaagcagagatcatttgaaagtatatataaaatatcctcaatcctccactgtttatatatgtgtgacttcgtgtatgcacatatatttacaatgacctctccaaattgttaacaattttgctggagtcttatatttctctattataacatcctggtcaaggctaaaatttgtaaaccagactaactttcagacaatcataataatacagaagtcaatgtatctttttacatggcttacaaatgtgtttctacaagtatcttggtgctactttggacttggccacattataaggcttatttattcttgtcattagttctcatactttctgtaacatgtattgtgccctgctcacagggtacaatgaaaacaactttcctcaactaaaagacttgtattgggctaatacatttgacacaacttattttggaaataaaccacattagcatgtacctgcttagtttattatttttgtatttgccggcaaaagtcccttccagacagccttgtttgcaagttgagtcagtatattgacaatagggcattttaagtaggccctgtacaagatgttttttttttcaaaattcctcatgtatattataatttataaattttacattttaatgtatgtttttattcctctgtataaaatgcaaaaggatttcattgccatgcatttcattaaatccgttttcaaaaaccatcatttactacttcattcaggatgaccaaaaaacaaaataccacaacgctacattttgctggtcgtaagtgggaggctgggggccaaatgtttagactaacgtagttaaattaccaaactatactcctttaaccctgcaagcagcttattatagatatagacgaagaatctgtaactcaggtttctcaatataatccttcacaaagctaggtttacagccggtcctaattatgttcccctccatggtaaccactgcctttctaaatgtactaagaatattaaatctcaattaggtaatgggccataaatgttctggaatatatatatttagaaagttcctcaaagtttataaatacaaagcagtgactatgctcaaactgttgtagcaatagggatgttatggagcaagttttatcagtgcattatgagttcaataatccctattagagtatcccatttctcctgaaagcacagacatctacctatcattttttgtgtatccatggtaatgaatatgatggttgctataataccctaagttttgggaagtttgggaacttagttaacacagaataaggaaatgaaaatccaggaacaaagtagcgactaggctcattatatgcacaaatagaaagttctaacagacatcaattactagaagaaattaattgtagaatcttcagtcatttgagaactattttctgaacacattgttccagtattgtcttaagcactgtggatacatcagtggaagacaccaaccttgttctcctgtagctcctattttaatggataagaaactgatagagataataaacaaaagattgatacaagatcttagtagatggatgcaactatgtaagtagaaaggttccatcctcaagaaagctgtccagcattgtcgtacggtcacatggtcattgtgagtctttattgacaaggaaggcaagaagagtcttgttgacgaattttaaggttaagagtgatggagaaagaccttgatgttttacagccttctatggatattcatgtttatttccttcagggatgattcctacccaacagtttggaagcacaaaggaaggggagctggacagacaaggataagcacaggaattgatttcttgtcttgtctgacaccaaactctcttcaaatcctatagcaattctgtttgaatgaagatggagtggttagggttagtgtgaccaaagaagaaattccacaactcagttttctttttaaaatttctaaattaccacatatcattatttgttttcataatgctttgtcttggatatgggctatggtttctatacccagtagacaagtttgtgtaaattggcttttgtgaggaaaatattttctacaaatcagtgtaacatgaatagaaatcaagctaacaattgaaaagtgaatatgaaggatagcatgtctcttcactcatgtactatattgggaaaataaagacaaaaataaatgtatttacttatatgtttatgtgaaatatgcccttagacatgataaaaagcccacaaattaaactatcagcattatccatgaatttgagttctcctgcatgttctgcctttttaaacaacagtcacctcatccccattatttttagctccagactctaattgtttcttttatggggtctaggcctatagtgtccttggtaatatgcttcatgatgcttgcatttacagtaattgtttggcagtttgccactgagtacaacaactagaaatacttggctaggccagcttcaagtcttcataaacacggtcaattttctaagcagcaatagtcaacacaactgatggcaatcttttacaatcacgtatttcacagtggggaaccagatgcattgtttccttactgtagaaaaaacacaagaaatatgaaggaactgaggtatgggtgtgtaatttctatgagcatttaaaattaatgtttaatggatctgattataccagaaaaagaatatatccacaatttgtatcgacactagtgcatttggttatctttagtgctttcctcaatgctcttctctaaataaacctgcagtagcaagtgagttttactaggggttaattttatcctagttacaccatcttttgtaaaaactagtgtagactagcactaaccaatgtgtctctaaactgaataccctgagaaaatagaacagttaggtatccacactcaggttctgctagaaagattctgatttagatggtctgggtcaagttctaggttcaaggaaagttttaaagttttcaagatgactctggtatatggaagattgaacagaaaggaaagaaatgataggaatgcaattgagttgtaattttaaatatatcctaaatctgttattagttatcatatcctgaaaatgaaataagactgtttaacctagggtaatcaaaaattcaaatgatatgaaactttggaaaaatgtcacctgaacagtttctatgcatctgtagctgcaccactaaggttcatgggcgaggaatacactttgtatttattaatgatattttgtctgttcaatgtgttggagaaaagagcatatttcctttcaggaacaatggagcactatgtagcatggtgaagtaaatgtcaatttagaaataaacttcttttttttaatgttctttaagtttattttttatattggctatttcaaatttacatttcaaatgttatcccttttcctggtttcccgtccaatccctttcccatttcccttacccctgcttctatgagggtgttcctccatccacttacagctccctgcctccccaccccgacattcccctacactggggcatccaatcttggcaggaccaagagcgtctcctcccattgatgtccaacaaggccattctctgctacatatgcagttggagccatggatctgtccatgtgtactctgtagatggtggtttagaccctggtagctctggttggttggtgttgttcttatggggttgcaaatcccttctgctcctccaatactttctctaaatcctccaacagggacctggttctcagttaaatggttagctgcaagagtctgcctctgcatttgtcattctctggcagagcctctcaggagacagctatatcaggctcctgtcagcatgcacctcttcgcatcagcaatagtgactgggtttggtgactgtatatggtctggattcccaggtggggcagtctctggatgtcctttttccttcagtctctgctccaaactttgtctttgtatttcctcctataaatatttttgttcctccttctaagtactgaggaatctgaactttggttatcgttctccttgagctttatgtgatctgtggattgtatattgggtaatctgacctttgtggctaatatctacttaacagtgagtgcataccatttgtattttttttgtgattggttatgtcattgtcactcagaatattttccagttccatccatttgcctaagaatttcatgaaatcattgtttttaatagctgagtagtagtacactgtgtagaagtaccacattttctgtatccattcttctgttgagggacatctgggttctttccagcttctggctattataaataaaactgctataaacatagtggagcatgtagctttgttacatgtttgagcatcatttgggtatatgcccaggagtggtgtagctgggagcttaggtagtgcaatgtccaattttctgaggaacctccagactgatttctggagtggttttactagcatacaatcccaccaacaatggaggagttttcctttttttccaaatccccgacaccatctgttgtcacttgagtttttatcttagtcattctgactggtgtgaaatggaatctcaggttattttttttgatttgcatttccctgatgactaaggatgttaaacatttctttaggtgcttctcagccatttgatatttctcaactgaggattttttgtttagttctgtaccccatttttaatagggttatttgattctctagagtctaacttcttaatttctttgtatatattggatattagtcctctataggatgaaggattgataaagatctttttccaatctgttggttgccattttctcctaatgacagtgtcctttgccttacagaagctttgcagttttatgagatcccatttgtcgattcttgatcttagagcataagccattggtgtttggttcaggaaactttccccagtgctcatgtgttccagatgcttccccactttttcttctattagtttgagtgtatctggttttatgtggaggtccttgatccacttggacttaagctttgtacagggtgataagaatgggtcgatttgcattcttctacatgctgacctccagttgaaccagcaccatttgttgaaaatgctatctttgtttccactgcatatctttagctcctttgttaaagatcaagtgaccataggtgtgggttcatttctgggtcttcaattctattccattgggctacctgcctgtctctttacccataccatacagtttttatcactattgctctgtaattctgcttgaggtcagggatggtggtttcccgagaagttcttttattgttgagaatagttttcactatactggttttctttcttattccaaatgaattttacaaatttctcttttcaactctatgaaaatttaagttggaattttgatgagaattggattaaatctacagattgcttttgacaaaatggccatttttacaatattaattctgccaattcatgagcatggtagatcttttcatcttctgagatcttcttaaatatctttcttcagagacttgaagttcttgcattacagatctttcccttgcttggttagagtcacaccaaggtattttatattactaaggactattgtgaaaggtgttatttcattaatttctttctcagcctgtttgtcccttgagtagaagactactaatttgactgagttaattttatatccagccactttgctgaagttgtttatcatgtttagaagttctctggtggaatttttgggggtcacttaagtatactgtcataccatctgcaaacagtgatatttttttttcggagctggggaccgaacccagggccttgcgcttcctaggtaagcgctctaccactgagctaaatccctagcccgatattttgacttcttcctttccaatgtgtatccctttgatctccttttcttatctgattgctctggctaggacttcgagtcctatattgagtaggtagggagaaagtggacagccttgtctagtccctgattttagtgggattgtttcaagtttctctccatttaacttgatgttggctactggtttgctgtatattgcttttactatgtttaagtatgggtcttgaattcctgatctttccaagacttttaggatgaaggcatgttgaattttgtcaaatgctttctcaggatctaatgagatgatcatgtgtgttttttttaatttgagtttgtttatatagtgcattatattgatagatttccatatattgaaccatccctgcatccctggtatgaagcctacttgatccataatgataaagggaacatctaaggactgtttttcatcttaaagacactgaagagttaaaggccgatagtaggacaccttggtaagagggaaactatgaactaagttctgtttagagaataaagctagtgagatgctaaaagttgtctgagcagtcagaaatgtgcagtcagcagtgtcaattatgtaagttccgattacgctatatcttcagttgatagtaatggatctggaatcttgcctttctatagtgttaaataaccttcatttctttgaccaattttatgtgacaagaatggcggtgcaatccatgaggggaaggatttgcagtcacacatcctttctgaagaacgtgatcatgggaactagtctatgcttcaaaaaccaggaagctccattggcagtcctagtctttttcagggagggcttttagggaatgtaggatcatcccaatctgtacccttgatctgttatatactatattgatattatttatctaagtagaggagaccaataaaatcttccccacaatctgcttcctgtgctttcaatgcatggactatgtttgagtggcatattcttgcatcatcacagtaacctagggatctcagatgaaatgtttcctccctagtaaaacctttcctcctagctactgcacttactgaaattacaaattttttagcagttatttttatgctttggtgtgtgtgtgtgtgtgtgtgtgtgtgtgtgtgtgtgtgtgtgtgtgtgtgtagatgtgcaggtatgcagttgtgcaagcatgcattcttcttgcacataggaagtctgtgtgttgtgtatcattgtgtgtacatgtggaatcctagggagggcctgagatgcattatcttagcacactctctgcctcattcccttgacacggggtctttcactgaacctagaactagggaggcagccagcaagcctttgtagtcctgttgcccttttcacaataccagggttactacaggtgtgcagacaaagccagaatcatatacagtagagattttaatgtgggtccacatgctctcatagtaagcactctgacttgaggaaatcttgcccatccctgaaagggattttggaaatgccagtttgggtttgtctttcattagatttgaaactttatgaagacataatcagttccatgtctgcctggtggttcaatttcaagactactgtccagcatgtgctaaattttcttgtaacaaatgcatttctaattttatgtagcattattaagaacattcaatattagtattaagttcttttaaaaaccacccatagacttagttacaaggatgactgcacattctggactgcactactcaaagtatgtaggtgacatctttattgacgcaactccatctcgtggaaacttgcctctttcaccgaaaaagaacaatttcacatgtgtttctgtagcatttatatcttatttcttaagcaacatattgctattttgaagatttcaaaccatactctgactcagctttctttatttcattttcttaagttttcttcataatgaaaaccactctgtacagagtggaacccaaagctttcagctggtgatctatcttcacaggatcaactccatcctgtgaggatcactctaaagcctcctgtaatacagacaatgcaatagtgtccgatttgtcctctccttgaatttcctctcttaagtttacatgtccagatacataaattctaaatctgcatttctattctccagtctgggacctaaacaagaaaagaaataggtgttttctggcatttaatgaaatggcgtttagtattggaatgccatccaggatatgaagtataatttgctgcagtgataataactctaataaacattagttacattaaaataatattattttctggtaaacagcttgaataaaataaaactgatgtaaaaatctattcaaggtagtgagaacctaatttaattttgtatgactaatttagtatcatgatacatattttatgatagattaccgaagacttctgtggacacatcataagagggtatagcatgtggagtttaccaattgaaaactaacagtctgtcccctgaaattttgcagaaaatagaagcaaagtatattgcttcccttccacatattaaaaatccacattcttttctgttttacaagattgcattgtactttgaattagcagaaagtgaagaaaggcagaatataagatctcagatgaaaagcacgtgaaaagctacaaaggctagcccgagactttcccataggttcaaagagaatgttaatgtagaactatgtccttgatgcccgttgtaaacaaatatttgttcaaagactgatataattttagatactgttggaatataggtagtaattttactctattggcatatatgtaaaattccaaaccaataataccattcatggtttgcttgctgtggctggacactgtgtgctatgtattcatttacttgttaagtttagcatattagcttggatacttactcttgattgagctcctagtgcctgctttcttacacacttcattgagcttttgtctgctctgatctcttgttcttaaccgagtccacactacttgctccatccacttccactacaaattatgcaatggttggtttcattttagaaggctgctttttttttttttttgagtgctttctccactttgctatgttgtaagtcaaaaaccaattagacactggaaaaaatataaaatcatattttatactaaactttgactgatttagtcaaaatgcttcaagtggtttgtacatttcaacctggcttaaatcaaagaagagggggcaaagaggaggaggtgtttgaataggaactggtaatctcacataagcacagattcttttgtgaagaaatctgacacagaagattgaagggaaaaaagtagttcacagaaggtgtgggtgaggggatggtaaaaaaaaatgtaacacaaaacatggacatttgagaggtatgcttcattgctttgcatcgatgatttgcatattaagaagtcaggagccttcacattaatgaatccctaactagtttctgacacaatagactgatatgtccctggaggagtcattatggtctatcatgtcaatgatccacatattaatgactctctaacaggctcatcaacaggtagcctaaataggttcccattgagttcttttacatttgctttttaaatgtatcttttcttcccttccttttgtaatactattgtgaagaattgacaaaaaggcccattaagataattttaatgtgtgacttaagttcacaaaagcattaaatttagaaatggtgccttaagactaacccggactgcctaaaaaaagtttctaaatgcagttgaaaacaaaactagtttgataagggagcacttatttggattttaatatgaaccatcttgtctaatttactcagttcctgactgtcttgatacactaatctttgatgtgtttagtactagtagaagaattagtttgaaagtatgattttaaaatgaaatgactggaatatggaattaaattccagaagactataacatacaagctatgaaacatttatttaaactgaaacaataattaatagtaaaaataattttaaaatatatagaaaattctagaaatagttgatttagtaataggctgaatatctcatgatctgaaagaatgacttcataactttaaataaactttaaataaaagttcaacagcaagattcctagtatcttaaaatgtcttgggacactttatctaattaattataattattatattaaaaaatttgttgattctttaaaacaaacatggagtctatgatgtactgtaatatactgaggaattggagtggttggagagatggataagaagttaggaatatcagctatatttccagaaaactctcgttcaattcccaacattatcataacagctaaggacaggccattactttaagatctgaaaccctcttctagctttgcttccaaaggcatcagtaaaaggagaagagagaataaagagagagaggtgggaagagtaagagaagaaaggtgataggagataagagagagaggagagagaggagaagagagagaggagagataggagagagagaggagtgggagtagagggaggagagggaggagagaagaaagcatgtgcataggagtgaaggacaaccagtattttcttaaatgtattagcacctctttatagagaaaggttctcttatccatgcaagttatacatgcaagaacaatgtccttacacattataaacacataagtaaataaaaacaatgaagagttgctctactaatacttttgttgaataatgaactattttacttggcttactgtaggcaagagaaatagtgatacatgtttgaaattctttgtcagaatccaagattgagagaaaagctgggaaattttagtattttgttccttattaaatagactaagataaacaacctgaaagagaacggacatcagaatgttggggaatgaaggacctcagcatttcaggtgagttgtaccaggtcactactctgacctcatacagaaccctaagtattcttggttgtccacatatggaattagctaaatgcaaaatggctaggcacaactgtagggggatttttttctttaatcatttgatgtgggaagacccacttttagtctagatctttgaatgtgaaaggatctgcctttcatacagatctttgaggtgaaagggtgtacctttaatatgagccacaccttctggtggcagtccatgtgaaatgaatggaagacaaaacctccgtctttgtgtgcccatctttgcagcaagcccattctttcattagtattaatgcccacctcgtcaagattctagtacatactgaagaccagctgagactcccaacctagtggactgaactactactggaatcttggcctttcccttggtagagagtcattaaactaagtggacctaagcgtgtaagcaactctaataaatttcatcatatatatatatatatatatatacacacacacacacacacatatatacctataccatatacacacatatacatataaacatatatatatatgtatatatatggtttcttgaaccatatatatgtgtattacaaatattataactatgtataaatataatatataaatgtattttttcaatatatagtatcccatagtcaagatagtagagagaatgagcaggtgcataagagtagaggacacgggttggggatttagctcagtggtagagcacttgcctaacaagcacagggccctgggttcagtccccagctccgaaaaaaaaagaaaagaaaaaaaaagagtagaggacagaagtcatcaggtgtcctttttgaggtcctcttcattttacttttgagataggatctctcattagacctggatctcaccagtgggttagattgactagcttgcgagaactgcattcctcatgtctctgctttatcagatctgggatatcagggcccattacactggattttgtatatttgtgttaaacatctgaactcacagcccatattcagtgctttgcccactgagacaattcttagtccccaaaccaatgtacataaccaaccaaataacttacatgataactgtgaacactatagattttattgggaaaactacatatttagagaggctttttaatatgcgtcctgacatataaagctcattcagctttaactctgctgaaatctgtttttttgtagaacaaaaaaaaatgataaaaaagtatgaagggagttttagttggaatgtattaattttgggaaaacatacatattaaaattccaaaaatacttttgaaagacagaggcagttgttatctcttaggaattagattgtgggagattttgaagaatgagcaatcgaactttggagacagcaagggtttcagctggacagtcactagtttcctgacatctacctgtgtcatgggtgtaattatgtcctttaagaacttagataaagtaaagaccttagggcagtaagtttgagagtttttttccccagacaacttgctgatatacattcttcagttgttcaggacccatcacctaaagacatttacatttctcgccataaaatataattggcaggtggtagcagagaagtcccttaagccaggtttatctatagtcttcttccacttaaaattcatgaattctgcttgtaattacatcacattcccaagaaacctacaatgtttttttagtccacatctcaacttccaagattctacttaatgatgtactagaccctcctcagtcagtgccttgagaagtgcacatcacttctgtcaatatgtgtgatgcttgagtccatgacagaatagtaaaatgtaagatgtcctttctgctgtggagaggagctagacaaaacagcacctgccacgtggacatgaccagacacattcagacttgtaatttttcttgctacaaactaatgaaggttctttgagaaaacaaacaaataacaataacctaccaagaatttctccatgaaagggtgacttttagttgcttctttgtttgttattgaaactattcttcacaaaaagacaaagcatcattggtttttgaattgaagtatcaaggtgaaacaaaatgttctaataatgtaaattgaaacagtatatttcagaatatagtttcagggtctcaataggattaaaaaccaagagagatggtttatcaggtaaaaacttggcagcaatctgccacccaggctgacaacctaagttcaatgatccacagctaacacatgtaggttccttctgatctctttacagacacaatatgtaaacacacagacacacacagacacagacacagacacacacatactcaaacgcacatgcatgcacatgtgcatgtacacaattaattaaaacctttgaaagagatgaaaaacaagaaaattaagctgattggaacaaattgcatagtgttgtagctggctaggagttattcaacagtaattctactttctctaaaacagacaaataactcaatgttctctatgatcttattctcttctaagcttgagcagttcatttaatttattcagccagcttgtgctttattattcttgacttttcattatattttaaatttttatgaaattagtttttgtgttaggttctaatacccttgtttatcttaacttatggtagatattagcaaagtttaaattatcataaagttctacttgacatgcataacatagtagtaaataagtgattccacactacacagtggagaattaaaagccctgtagttttgtttgaacaggttacattacaatttcaaggtaacaactacttctattattttatttaaaatttttcacatacaatatattttatcatattatttttcttcctcaaactcctctcagagctacctaccgaacttcatgttctttctctttctcattctctttctgtcttaaaacaaacaagaaaagagaagatgaaaagcagcaagcaaaaaaaaaaaaggaaaaagaaaaatatagaaagaggacatcatgtcaggtgttaatctgaagacttagtagataaaaacaaagcaaaaccaaaccaaaccaaaacaacaacaatgaaagcgcagagccagcattaatattctaatattcttctctaaatactgtgttctttgggtgatagcttgtactaacaatctaagtattttgaaggttggcaacaggatcaataattttaaggttatggcactgggatacacgaagacatcatgttttgaggaaagaaaagaaaaaaatctcgtagaagatgttcataagggacataaataagaccacagcttgaaacacaaatgatgtagaatatcttaattactgttttttagcataaaatgagaggtgatgaacaaacatttaaaagctgaccctttatagacagttgtgtgtgctctgggtcaatattagcgaacattaaattcaatacctatgactcttttcgaaatggtactttgttacagtcaacattttaaacactgtctgaatagttacattttgctcctgacaccctcattctgccgctcaccctgatgggttgatgacatctaccataccagactatgattttgttgaactagtctttgagaagtttctccaataaattatgggccatatatgagatttttagcaccctgacattataggaatttaggaaaaactattattaattatcctaaaactgctacattcaacagtgatgaaatgaaccataacccaggaatggtaggacaacacccaaatgtctagaattattaagtcttacattgagtaaattgtgttttaagggaaggtgggaataggcatccaggcaggccacttttgagaggctgtgtttcaaaaacgatggcttgtttcaaatgtctgctaagctttcttatactgtgggattatgataagagactattttaaagtttaagagagtgtaaaccaaggtatggaagttttctttcctttaagtagcttgtgaattaatgagaaaatgtggtagatattaaaaacagccaagttcgagttaaaatggagataggagtcagctgctattctatagtatgtacagtgtgcatggcacatcattaatagtaacagtattgatgataaaaagtattatcagctccatctattagaaagtatacaaagtaattactctaaaggactaagtgatgatgtggaggaaaacaaagtattgagatactgtgtatctggcttgaattcacaatattagttcaagtacaagctaagtacaagtttagtaacagaaaaacatattggtatggaagaattagtgttctttccaaagctattgatctcagaagaattctggtttagagaccaggccaataggatatctaactttaccactagttactttttgataactgtgccaacattgtagagctgattcattctctgtgtctctgtgtctgtgtctttgtttttgtctctctgtctctgtttgtctctgtctctttctcaagattataggatgatatcaccttagtattaggtcccttatagatctaaatcctatttagattagttaaaacttgctaagaagttgaatgaactcatcctgtttctctcatttactatcagacatccattagttaaaacaagaacaacccaagtaatcaaaaacatacagtaatccttctcacagtctgctttaaactaactccagtttcatttttgattttctacctcgataaacaattcaaaccttctgagagtcttattgctcttggacatatcctgtttcgtgccatttatagtttatacttgttacttacaattttttgattactttgaaatcagaaacttcttacttctcaattagtaaattcagaatgaatctgcgaattgtctccaagtttcctcattttaatgatctttcatctctaaggcagtagccatcttatctcattatttattgtaatatgtttaattcattgtaactattatgctttattgatttatctattcctgtcattatttcattgtttgcttggagtaaatatctagatattgctaatgttatatttttcaatatttgttatagttaatggtacatattcaaactatctgtagaagaatgaacggtccttccacattaaataatatgggtaactatcccatataactctgtttatgagaatgaaatattgtttcaaagaacctagattctctttaacacatttttaaaattaattttaaaaatctaaattaaaacaactacgttcaatcatttgacccccaaaattctaaacttgggaagagataataatttaagccttagaatatatacagatgatcatttgctgcttttctttgattaaattttgtgtaaagaagagatggcatcattaaaatgctggcaagagatagaaagaaaaagagaagctagaaaaagggctgtgcatttattcaacagcacgtctttgctattagactgcatcaggcagtgtgtcaatcaccaggatcgccaaaaaaaagggggaaagaaaaaaagaaagaaaagaaaacagttcttgagaacacaatagggatctgagagatagtaaaaagatggctttacttatgttatagtcagatatagtgaaggaggtggatcctgttgtccataaccaatagtcttcatctattttctttctctttttctagtccctcttcccattcatttacccttctcctctgaaggactgttgacccaccaagactatccccaaccatggcacatcacgtctctgtggggctaggcacatcttctcccattgaggctagacaaggcagcacaaaaacgagcacaggatccacaggcaggcaacaactttaatgacgggcccctctgccctaacccctgccccaccccagcttcagttgttgaagggctggaatgaccacctagttgcaagtcagctatttgtagggccctaggtccaccccctgtacactctttggttggtggttcaatttcttagaccttcaagggtacaggttggttgattctattggtcttcctgtagagtttctatcctctcaggggtcctcaactggggtgtctaaatccttcccacaactcttccataagactacctgagctctgtccatccaatgtttggctgtaggtctctgcatctgttttaagcagctgcagtgtggagtaggacacactcaaactctcagagtacagttatgctaggctcctgtctacaagcatagcagagtatcattaatagtgtcagggattggtgcttgcccatgggttcacctcatttttctaattgtaagcctgcttgattaaactcttaattgtaaattggtttaagtaagcactttagatgtagttagtcaagtaaaatgttacttcaaggttaaaagtgatattttgtttgcacatatcctacaatatattgcaaagagcaaaccacatgctctaataagtaacataaaactattgtaaatgatgaattgactatgcaaaacacaaaacaacaatgaccacaacaataacaacagcaaaaacccagacctgtgatgatctgatttctcagatgtgctgatttcttccttccaaacttccttagaaatgctgactagaatcctgaaaatcaagatttccttcagatactggttctgaattgtgttgatttttatgtaatacaagattcttctccccaggtttaatcttttttaaattttacagtctttttcagttttattttgttttattatatgtgcatgagtgtattgccttcacttatgtctgtattctggaagcttgcccggtgtcctcatatgttagatgatggtgttagatcccctgggacaggagttcttgattgttatgagttatactgtatgggtgctggaaattaaacctgggtcttccataggaatgacaagtgctcttaagcactagacaacatttcaggacaccttttatcatatccttcaatgaacaaagagttcaaagtttagtagtagggctagaaagatgacttagtgattaggagcactagcttgctgctcttacagaggtcctgggggaatggtaccacacagtagctcaccatcacatcactccagttccaggggatttaagcttctgtttttcattggtattgagtacaagtagttcacagacattcatgctctaaaacaggcacttacaataaaaataatagtttttaaaatatttaaattttaagagaaaaactaaagtttattttattataattttttattatttaatggattcttcctgctctgtataatcatatatatttttctcctaggaattttcaagtttttgtcatgttaataatttgttcacctggagctgaattttgcatatgttctattgtcattattttccctagatagagtcatgtccctgtcttcattttattatctttttatctcccctctttgctagatttgaccttgatgcatcttctcattattctttgagttctatttcccagctggtttgcagcttttctgatacttgtctttcaagttcactttgcataggaaggaacccttaaaattagaagaagcagattccccctccccctactctatttctcacagctatggagtcattattatcatctgttcttctccttagaatcacataccaaaactctatgaaaaccggctttatcattttgactaccattcattgaatctatacatcaaccttcataatatttcatccctaactatgatcatagtatatttctttaatatttgtttatgtagttatatcatttagaaaaattcagagtttataagatttgtcctctatgtgttctgcatagtgttataatgtttctgtttcttgagtatcgagctttcatccttacatatatccttgaatataaagttttcccttatattcctgaatgtccatgttttgaggacactcgataataataaggttgtttcatcactaattatttgtctcaagggtgagttttttacaaatgaaactcttgtcccttcaaaacaatcatttttagtgaagcaattaaaattgattagaaaattcactgataatgttttggtaaataaaaatgttttttagtagcaaataatttcactctacaaataaattttagtagtgttttaggaaaaaataaaatttgggaacaattgtttctttaatagtttatatgtcctcttaagaatatttaatccatccttttagaatacaatgtgctttgcttgtatcaaatgccaattcctcccagatccagtcccacctctacacccactcaattctcttttctttaattttatttttgttttacttattcacatcccatctcaccttctcctctgagtgagtggggtcctctggatatcttcccatgctggcacttcaagtttatgcaaggctaggctcttcccctcccactgaggccagggggaagcccagcttctacctacccaattctctctctctctctctctctttctctctctctctctctctcaacataaagagcccaatgtgttgtgttgattgactgctcttagatacagggcttttcctgcattgtggttgctttaccacagagtatatcattaaataaatctacaatactgcctcttcttctagcagctctcaaaagcctataaatttgcaaccggaggtgggacttcatgcccacctgccacctttatgctagagttttgtctggcttgagtttgcacaggtgtcacacatgataatatgattcctgtgagttcatacatgtggttgtcctgctatacccataaaacagttctctaaatgtctctcaaccactgataacgtattgctattacctaaaaaaactatgtgtatcaaagctcatcagagaagtttcctggggcgggggtgcagcgacctacaagtgatccaagtactgaacaagatgctgcagggtttacagacctaaataggctatttatatcgtacacctttcccgaagactcagagttcttggcttaaggggacaatagtttgtaagagccagatggggtggctgcatttcagacttgcatgttcttaaacgagatattatatactcaaaatagcaaaattattgttttataggtgaatttcataagcgataaataattgcataggtataagtcttggtaatagattaattcaatttctgtacttcaagctctatagtttaagaatttttatgtacatagaatattagttttattgtaatgcccagaaatgttgctttcagtaatgttaaaatgaaacaataaaaaatacatacaaaattaagttactttcttacataatcaggagggggaaagcttaaaaagtacatatggtttgtagaaataaaattagccatgctggaattttcagaacctagattcaattatacaagtttatcagcaaatgtcactttttaaatttcttctcttttttgttgttgctttatttttttgtttgttttgttgttgttgcagaaactcactggggaaaaaagtcattgtaataaaaacggattaagggtgggacatgatggtgcatgcctttaatcccagcacttgggaggcagaggcagaggcagaagcagatggatatctatgagttcaaggtcagcctagtttacatagagagttctagaactgcgtgctatgaagaaagaccctggagaggaggctggtgggtggaaaaaaagactgtcaagaaaagtgagaggacacagggggtgaagtgcttgctatgtgatctgagctcaatccacagaacccatgtaaactcggaaggagataatcgcttccaaaaccttgtcctgtgctatcacatttgtgccgttacacaggaacccatccatgcacatcagatgtacctgataataatagtaaaatgtaaattaatcttaaaaagaaaaccaagacataaattaacttttgagtaattgtacataaattgaaaatttcactagttatatttttatattgagtgttggagactaatacagttttaatgacctcattaatctgcctactgacatttaaaaggggaaagtacatatcatttctaataagaaggcaatacatacaacaaaaagcaatgaaacctcaagaattttgaagaaataaggtaggtacttacatatgagcctctgaaatctccatcttaaaattggtcagtgccaattcacacatgatactgttgggcataaatcttgcacctttcaagttttagtgatctggtttgaccttatttctcttttctatagagagaaatttactttcataacaatgcaattgaaatataaacaggctaccaaacataattacctaaatgttagacaccaattttataacaacaatggaaagtcaattcttaaaactttgccatttataccagaaaaaaaaatcctctcaatgaaaggttaaataaaatataatgaaaagcacacatttgcttatagctttattctggctatgttttagtagacacaacataatctcatttaaaatatgtcattgtatagattaagtttttataaaatcagaattaattactctatcaccatggaaggtttacttacatgatttgtaatacaaaattatgaaaggttatacaaactatttgtcttactgataattgtccaccatgtaaagatattttaaaagatgtaatttcaaaacaaacgtatgtttttctaaattttagcagtaaagaagaaccattgctaacaccagaagaaaataagcttgggactttgaagttcacaggtaatgtttatttaaaatgaaacaaaatctatttttctgaacgtcggcagtataaaaagtgttataattaaaaaccaattgtattaacttttcagagtcctacatcccaaccattatttgttctcatgaggacagggatgacttgggagccaattatcaacatgtaaaagacatcgacaagaagcatgatgaacataatgaaaaggaattagacttgatggtaagtgttcaggttgccacagcattagagaagacaaatctatttatgcttcaaagatgctgcaacgcctgcctctcaatggcttccgctaatataatttgcacatgtgaagccatggctta

1. A complex comprising an anti-transferrin receptor 1 antibody covalently linked to a molecular payload that modulates the expression or activity of myostatin (MSTN), inhibin beta A (INHBA), activin receptor type-1B (ACVR1B), myosin light chain kinase (MLCK1), activin A receptor type-1 (ACVR1), atrogin-1 (FBXO32), tripartite motif containing 63 (TRIM63), myocyte-specific enhancer factor 2D (MEF2D), Krüppel-like factor 15 (KLF15), Mediator complex subunit 1 (MED1), Mediator complex subunit 13 (MED13), and/or protein phosphatase 1 regulatory subunit 3A (PPP1R3A), wherein the antibody comprises a heavy chain complementarity determining region 1 (CDR-H1) as set forth in SEQ ID NO: 51, a heavy chain complementarity determining region 2 (CDR-H2) as set forth in SEQ ID NO: 52, a heavy chain complementarity determining region 3 (CDR-H3) as set forth in SEQ ID NO: 53, a light chain complementarity determining region 1 (CDR-L1) as set forth in SEQ ID NO: 54, a light chain complementarity determining region 2 (CDR-L2) as set forth in SEQ ID NO: 55, and a light chain complementarity determining region 3 (CDR-L3) as set forth in SEQ ID NO: 50.

2. The antibody of claim 1, wherein the antibody comprises a heavy chain variable region (VH) comprising an amino acid sequence at least 85% identical to SEQ ID NO: 61; and/or a light chain variable region (VL) comprising an amino acid sequence at least 85% identical to SEQ ID NO: 62.

3. The complex of claim 2, wherein the antibody comprises a VH comprising the amino acid sequence of SEQ ID NO: 61 and a VL comprising the amino acid sequence of SEQ ID NO: 62.

4. The complex of claim 1, wherein the antibody is selected from the group consisting of a full-length IgG, a Fab fragment, a Fab′ fragment, a F(ab′)2 fragment, a scFv, and a Fv.

5. The complex of claim 4, wherein the antibody is a full-length IgG.

6. (canceled)

7. The complex of claim 4, wherein the antibody is a Fab.

8.-9. (canceled)

10. The complex of claim 1, wherein the equilibrium dissociation constant (K_{D}) of binding of the antibody to the transferrin receptor is in a range from 10⁻¹¹ M to 10⁻⁶ M.

11.-12. (canceled)

13. The complex of claim 1, wherein the molecular payload comprises an oligonucleotide comprising an antisense strand comprising a region of complementarity to an MSTN target sequence, an INHBA target sequence, an ACVR1B target sequence, a MLCK1 target sequence, an ACVR1 target sequence, a FBXO32 target sequence, a TRIM63 target sequence, a MEF2D target sequence, a KLF15 target sequence, a MED1 target sequence, a MED13 target sequence, or a PPP1R3A target sequence.

14.-35. (canceled)

36. The complex of claim 13, wherein the oligonucleotide further comprises a sense strand that hybridizes to the antisense strand to form a double stranded siRNA.

37. The complex of claim 13, wherein the oligonucleotide comprises one or more modified nucleosides and/or one or more phosphorothioate internucleoside linkages.

38. The complex of claim 37, wherein the one or more modified nucleosides are 2′ modified nucleotides.

39. (canceled)

40. The complex of claim 36, wherein the oligonucleotide is an siRNA listed in Table 10, Table 13, Table 16, Table 19, Table 22, Table 25, Table 28, Table 31, Table 34, Table 37, or Table 40.

41. The complex of claim 1, wherein the antibody is covalently linked to the molecular payload via
(i) a cleavable linker, optionally wherein the cleavable linker comprises a valine-citrulline sequence; or
(ii) a non-cleavable linker, optionally wherein the non-cleavable linker is an alkane linker.

42. A method of reducing MSTN, INHBA, ACVR1B, MLCK1, ACVR1, FBXO32, TRIM63, MEF2D, KLF15, MED1, MED13, and/or PPP1R3A expression in a muscle cell, the method comprising contacting the muscle cell with an effective amount of the complex of claim 1 for promoting internalization of the molecular payload to the muscle cell.

43. A method of treating muscle atrophy the method comprising administering to a subject in need thereof an effective amount of the complex of claim 1, wherein the subject has elevated expression or activity of MSTN, INHBA, and/or ACVR1B, and the complex comprises a molecular payload that modulates the expression or activity of MSTN, INHBA, and/or ACVR1B.

44. A method of treating irritable bowel syndrome (IBS) or irritable bowel disease (IBD) the method comprising administering to a subject in need thereof an effective amount of the complex claim 1, wherein the subject has elevated levels of MLCK1 protein and the complex comprises a molecular payload that modulates the expression or activity of MLCK1.

45. A method of treating a subject having a disease associated with elevated level of ACVR1, the method comprising administering to the subject an effective amount of the complex of claim 1, wherein the complex comprises a molecular payload that modulates the expression or activity of ACVR1.

46. A method of treating muscle atrophy the method comprising administering to a subject in need thereof an effective amount of the complex of claim 1, wherein the subject has elevated expression or activity of FBXO32 or TRIM63, and the complex comprises a molecular payload that modulates the expression or activity of FBXO32 or TRIM63.

47. A method of treating a heart disease, the method comprising administering to a subject in need thereof an effective amount of the complex of claim 1, wherein the subject has elevated expression or activity of MEF2D, KLF15, MED1, MED13, and/or PPP1R3A, and the complex comprises a molecular payload that modulates the expression or activity of MEF2D, KLF15, MED1, MED13, and/or PPP1R3A.

48.-49. (canceled)

50. An oligonucleotide comprising an siRNA listed in Tables 9, 10, 12, 13, 15, 16, 18, 19, 21, 22, 24, 25, 27, 28, 30, 21, 33, 34, 36, 37, 39, and 40.
